United States Patent Application Publication US 2008/0234183 A1 - sequence listing, part 2

SEQ ID NO: 26028 - protein, 16 aa, Homo sapiens
  ( 207 )...( 222 ): >HIK2_HUMAN
RGTFGQVVKCWKRGTN

SEQ ID NO: 26029 - protein, 16 aa, Homo sapiens
  ( 213 )...( 228 ): >HIK2_HUMAN
VVKCWKRGTNEIVAIK

SEQ ID NO: 26030 - protein, 16 aa, Homo sapiens
  ( 214 )...( 229 ): >HIK2_HUMAN
VKCWKRGTNEIVAIKI

SEQ ID NO: 26031 - protein, 16 aa, Homo sapiens
  ( 215 )...( 230 ): >HIK2_HUMAN
KCWKRGTNEIVAIKIL

SEQ ID NO: 26032 - protein, 16 aa, Homo sapiens
  ( 216 )...( 231 ): >HIK2_HUMAN
CWKRGTNEIVAIKILK

SEQ ID NO: 26033 - protein, 16 aa, Homo sapiens
  ( 217 )...( 232 ): >HIK2_HUMAN
WKRGTNEIVAIKILKN

SEQ ID NO: 26034 - protein, 16 aa, Homo sapiens
  ( 224 )...( 239 ): >HIK2_HUMAN
IVAIKILKNHPSYARQ

SEQ ID NO: 26035 - protein, 16 aa, Homo sapiens
  ( 225 )...( 240 ): >HIK2_HUMAN
VAIKILKNHPSYARQG

SEQ ID NO: 26036 - protein, 16 aa, Homo sapiens
  ( 226 )...( 241 ): >HIK2_HUMAN
AIKILKNHPSYARQGQ

SEQ ID NO: 26037 - protein, 16 aa, Homo sapiens
  ( 227 )...( 242 ): >HIK2_HUMAN
IKILKNHPSYARQGQI

SEQ ID NO: 26038 - protein, 16 aa, Homo sapiens
  ( 299 )...( 314 ): >HIK2_HUMAN
KYIRPVLQQVATALMK

SEQ ID NO: 26039 - protein, 16 aa, Homo sapiens
  ( 301 )...( 316 ): >HIK2_HUMAN
IRPVLQQVATALMKLK

SEQ ID NO: 26040 - protein, 16 aa, Homo sapiens
  ( 302 )...( 317 ): >HIK2_HUMAN
RPVLQQVATALMKLKS

SEQ ID NO: 26041 - protein, 16 aa, Homo sapiens
  ( 790 )...( 805 ): >HIK2_HUMAN
VMRQQPTSTTSSRKSK

SEQ ID NO: 26042 - protein, 16 aa, Homo sapiens
  ( 791 )...( 806 ): >HIK2_HUMAN
MRQQPTSTTSSRKSKQ

SEQ ID NO: 26043 - protein, 16 aa, Homo sapiens
  ( 799 )...( 814 ): >HIK2_HUMAN
TSSRKSKQHQSSVRNV

SEQ ID NO: 26044 - protein, 16 aa, Homo sapiens
  ( 800 )...( 815 ): >HIK2_HUMAN
SSRKSKQHQSSVRNVS

SEQ ID NO: 26045 - protein, 16 aa, Homo sapiens
  ( 801 )...( 816 ): >HIK2_HUMAN
SRKSKQHQSSVRNVST

SEQ ID NO: 26046 - protein, 16 aa, Homo sapiens
  ( 802 )...( 817 ): >HIK2_HUMAN
RKSKQHQSSVRNVSTC

SEQ ID NO: 26047 - protein, 16 aa, Homo sapiens
  ( 822 )...( 837 ): >HIK2_HUMAN
SQAISSPQRSKRVKEN

SEQ ID NO: 26048 - protein, 16 aa, Homo sapiens
  ( 823 )...( 838 ): >HIK2_HUMAN
QAISSPQRSKRVKENT

SEQ ID NO: 26049 - protein, 16 aa, Homo sapiens
  ( 824 )...( 839 ): >HIK2_HUMAN
AISSPQRSKRVKENTP

SEQ ID NO: 26050 - protein, 16 aa, Homo sapiens
  ( 830 )...( 845 ): >HIK2_HUMAN
RSKRVKENTPPRCAMV

SEQ ID NO: 26051 - protein, 16 aa, Homo sapiens
  ( 900 )...( 915 ): >HIK2_HUMAN
QKHAPTSTVSKQRKNV

SEQ ID NO: 26052 - protein, 16 aa, Homo sapiens
  ( 901 )...( 916 ): >HIK2_HUMAN
KHAPTSTVSKQRKNVI

SEQ ID NO: 26053 - protein, 16 aa, Homo sapiens
  ( 1051 )...( 1066 ): >HIK2_HUMAN
RTGSHRRQQAYITPTM

SEQ ID NO: 26054 - protein, 16 aa, Homo sapiens
  ( 261 )...( 276 ): >HLX1_HUMAN
AVLTKDTMPQTYKRKR

SEQ ID NO: 26055 - protein, 16 aa, Homo sapiens
  ( 279 )...( 294 ): >HLX1_HUMAN
SRAVFSNLQRKGLEKR

SEQ ID NO: 26056 - protein, 16 aa, Homo sapiens
  ( 289 )...( 304 ): >HLX1_HUMAN
KGLEKRFEIQKYVTKP

SEQ ID NO: 26057 - protein, 16 aa, Homo sapiens
  ( 297 )...( 312 ): >HLX1_HUMAN
IQKYVTKPDRKQLAAM

SEQ ID NO: 26058 - protein, 16 aa, Homo sapiens
  ( 298 )...( 313 ): >HLX1_HUMAN
QKYVTKPDRKQLAAML

SEQ ID NO: 26059 - protein, 16 aa, Homo sapiens
  ( 299 )...( 314 ): >HLX1_HUMAN
KYVTKPDRKQLAAMLG

SEQ ID NO: 26060 - protein, 16 aa, Homo sapiens
  ( 16 )...( 31 ): >HMGC_HUMAN
QGQPAAPAPQKRGRGR

SEQ ID NO: 26061 - protein, 16 aa, Homo sapiens
  ( 18 )...( 33 ): >HMGC_HUMAN
QPAAPAPQKRGRGRPR

SEQ ID NO: 26062 - protein, 16 aa, Homo sapiens
  ( 26 )...( 41 ): >HMGC_HUMAN
KRGRGRPRKQQQEPTG

SEQ ID NO: 26063 - protein, 16 aa, Homo sapiens
  ( 62 )...( 77 ): >HMGC_HUMAN
KAAQKKAEATGEKRPR

SEQ ID NO: 26064 - protein, 16 aa, Homo sapiens
  ( 63 )...( 78 ): >HMGC_HUMAN
AAQKKAEATGEKRPRG

SEQ ID NO: 26065 - protein, 16 aa, Homo sapiens
  ( 64 )...( 79 ): >HMGC_HUMAN
AQKKAEATGEKRPRGR

SEQ ID NO: 26066 - protein, 16 aa, Homo sapiens
  ( 65 )...( 80 ): >HMGC_HUMAN
QKKAEATGEKRPRGRP

SEQ ID NO: 26067 - protein, 16 aa, Homo sapiens
  ( 66 )...( 81 ): >HMGC_HUMAN
KKAEATGEKRPRGRPR

SEQ ID NO: 26068 - protein, 16 aa, Homo sapiens
  ( 67 )...( 82 ): >HMGC_HUMAN
KAEATGEKRPRGRPRK

SEQ ID NO: 26069 - protein, 16 aa, Homo sapiens
  ( 106 )...( 121 ): >HN4A_HUMAN
CRLKKCFRAGMKKEAV

SEQ ID NO: 26070 - protein, 16 aa, Homo sapiens
  ( 107 )...( 122 ): >HN4A_HUMAN
RLKKCFRAGMKKEAVQ

SEQ ID NO: 26071 - protein, 16 aa, Homo sapiens
  ( 108 )...( 123 ): >HN4A_HUMAN
LKKCFRAGMKKEAVQN

SEQ ID NO: 26072 - protein, 16 aa, Homo sapiens
  ( 109 )...( 124 ): >HN4A_HUMAN
KKCFRAGMKKEAVQNE

SEQ ID NO: 26073 - protein, 16 aa, Homo sapiens
  ( 110 )...( 125 ): >HN4A_HUMAN
KCFRAGMKKEAVQNER

SEQ ID NO: 26074 - protein, 16 aa, Homo sapiens
  ( 288 )...( 303 ): >HN4A_HUMAN
PDAKGLSDPGKIKRLR

SEQ ID NO: 26075 - protein, 16 aa, Homo sapiens
  ( 289 )...( 304 ): >HN4A_HUMAN
DAKGLSDPGKIKRLRS

SEQ ID NO: 26076 - protein, 16 aa, Homo sapiens
  ( 290 )...( 305 ): >HN4A_HUMAN
AKGLSDPGKIKRLRSQ

SEQ ID NO: 26077 - protein, 16 aa, Homo sapiens
  ( 291 )...( 306 ): >HN4A_HUMAN
KGLSDPGKIKRLRSQV

SEQ ID NO: 26078 - protein, 16 aa, Homo sapiens
  ( 292 )...( 307 ): >HN4A_HUMAN
GLSDPGKIKRLRSQVQ

SEQ ID NO: 26079 - protein, 16 aa, Homo sapiens
  ( 293 )...( 308 ): >HN4A_HUMAN
LSDPGKIKRLRSQVQV

SEQ ID NO: 26080 - protein, 16 aa, Homo sapiens
  ( 294 )...( 309 ): >HN4A_HUMAN
SDPGKIKRLRSQVQVS

SEQ ID NO: 26081 - protein, 16 aa, Homo sapiens
  ( 295 )...( 310 ): >HN4A_HUMAN
DPGKIKRLRSQVQVSL

SEQ ID NO: 26082 - protein, 16 aa, Homo sapiens
  ( 296 )...( 311 ): >HN4A_HUMAN
PGKIKRLRSQVQVSLE

SEQ ID NO: 26083 - protein, 16 aa, Homo sapiens
  ( 67 )...( 82 ): >HN4G_HUMAN
CRLRKCFRAGMKKEAV

SEQ ID NO: 26084 - protein, 16 aa, Homo sapiens
  ( 68 )...( 83 ): >HN4G_HUMAN
RLRKCFRAGMKKEAVQ

SEQ ID NO: 26085 - protein, 16 aa, Homo sapiens
  ( 69 )...( 84 ): >HN4G_HUMAN
LRKCFRAGMKKEAVQN

SEQ ID NO: 26086 - protein, 16 aa, Homo sapiens
  ( 70 )...( 85 ): >HN4G_HUMAN
RKCFRAGMKKEAVQNE

SEQ ID NO: 26087 - protein, 16 aa, Homo sapiens
  ( 71 )...( 86 ): >HN4G_HUMAN
KCFRAGMKKEAVQNER

SEQ ID NO: 26088 - protein, 16 aa, Homo sapiens
  ( 251 )...( 266 ): >HN4G_HUMAN
KGLSDPVKIKNMRFQV

SEQ ID NO: 26089 - protein, 16 aa, Homo sapiens
  ( 150 )...( 165 ): >HNFB_HUMAN
LSQHLNKGTPMKTQKR

SEQ ID NO: 26090 - protein, 16 aa, Homo sapiens
  ( 151 )...( 166 ): >HNFB_HUMAN
SQHLNKGTPMKTQKRA

SEQ ID NO: 26091 - protein, 16 aa, Homo sapiens
  ( 152 )...( 167 ): >HNFB_HUMAN
QHLNKGTPMKTQKRAA

SEQ ID NO: 26092 - protein, 16 aa, Homo sapiens
  ( 153 )...( 168 ): >HNFB_HUMAN
HLNKGTPMKTQKRAAL

SEQ ID NO: 26093 - protein, 16 aa, Homo sapiens
  ( 154 )...( 169 ): >HNFB_HUMAN
LNKGTPMKTQKRAALY

SEQ ID NO: 26094 - protein, 16 aa, Homo sapiens
  ( 155 )...( 170 ): >HNFB_HUMAN
NKGTPMKTQKRAALYT

SEQ ID NO: 26095 - protein, 16 aa, Homo sapiens
  ( 156 )...( 171 ): >HNFB_HUMAN
KGTPMKTQKRAALYTW

SEQ ID NO: 26096 - protein, 16 aa, Homo sapiens
  ( 157 )...( 172 ): >HNFB_HUMAN
GTPMKTQKRAALYTWY

SEQ ID NO: 26097 - protein, 16 aa, Homo sapiens
  ( 158 )...( 173 ): >HNFB_HUMAN
TPMKTQKRAALYTWYV

SEQ ID NO: 26098 - protein, 15 aa, Homo sapiens
  ( 24 )...( 39 ): >HRX_HUMAN
RRGLGGPRQRVPALL

SEQ ID NO: 26099 - protein, 15 aa, Homo sapiens
  ( 25 )...( 40 ): >HRX_HUMAN
RGLGGPRQRVPALLL

SEQ ID NO: 26100 - protein, 16 aa, Homo sapiens
  ( 115 )...( 130 ): >HRX_HUMAN
ALQVSAAIGTNLRRFR

SEQ ID NO: 26101 - protein, 16 aa, Homo sapiens
  ( 116 )...( 131 ): >HRX_HUMAN
LQVSAAIGTNLRRFRA

SEQ ID NO: 26102 - protein, 16 aa, Homo sapiens
  ( 117 )...( 132 ): >HRX_HUMAN
QVSAAIGTNLRRFRAV

SEQ ID NO: 26103 - protein, 16 aa, Homo sapiens
  ( 118 )...( 133 ): >HRX_HUMAN
VSAAIGTNLRRFRAVF

SEQ ID NO: 26104 - protein, 16 aa, Homo sapiens
  ( 119 )...( 134 ): >HRX_HUMAN
SAAIGTNLRRFRAVFG

SEQ ID NO: 26105 - protein, 16 aa, Homo sapiens
  ( 156 )...( 171 ): >HRX_HUMAN
EVRVRSPTRSPSVKTS

SEQ ID NO: 26106 - protein, 16 aa, Homo sapiens
  ( 157 )...( 172 ): >HRX_HUMAN
VRVRSPTRSPSVKTSP

SEQ ID NO: 26107 - protein, 16 aa, Homo sapiens
  ( 158 )...( 173 ): >HRX_HUMAN
RVRSPTRSPSVKTSPR

SEQ ID NO: 26108 - protein, 16 aa, Homo sapiens
  ( 159 )...( 174 ): >HRX_HUMAN
VRSPTRSPSVKTSPRK

SEQ ID NO: 26109 - protein, 16 aa, Homo sapiens
  ( 163 )...( 178 ): >HRX_HUMAN
TRSPSVKTSPRKPRGR

SEQ ID NO: 26110 - protein, 16 aa, Homo sapiens
  ( 167 )...( 182 ): >HRX_HUMAN
SVKTSPRKPRGRPRSG

SEQ ID NO: 26111 - protein, 16 aa, Homo sapiens
  ( 168 )...( 183 ): >HRX_HUMAN
VKTSPRKPRGRPRSGS

SEQ ID NO: 26112 - protein, 16 aa, Homo sapiens
  ( 216 )...( 231 ): >HRX_HUMAN
KSIEKKRGRPPTFPGV

SEQ ID NO: 26113 - protein, 16 aa, Homo sapiens
  ( 217 )...( 232 ): >HRX_HUMAN
SIEKKRGRPPTFPGVK

SEQ ID NO: 26114 - protein, 16 aa, Homo sapiens
  ( 218 )...( 233 ): >HRX_HUMAN
IEKKRGRPPTFPGVKI

SEQ ID NO: 26115 - protein, 16 aa, Homo sapiens
  ( 219 )...( 234 ): >HRX_HUMAN
EKKRGRPPTFPGVKIK

SEQ ID NO: 26116 - protein, 16 aa, Homo sapiens
  ( 220 )...( 235 ): >HRX_HUMAN
KKRGRPPTFPGVKIKI

SEQ ID NO: 26117 - protein, 16 aa, Homo sapiens
  ( 221 )...( 236 ): >HRX_HUMAN
KRGRPPTFPGVKIKIT

SEQ ID NO: 26118 - protein, 16 aa, Homo sapiens
  ( 222 )...( 237 ): >HRX_HUMAN
RGRPPTFPGVKIKITH

SEQ ID NO: 26119 - protein, 16 aa, Homo sapiens
  ( 224 )...( 239 ): >HRX_HUMAN
RPPTFPGVKIKITHGK

SEQ ID NO: 26120 - protein, 16 aa, Homo sapiens
  ( 244 )...( 259 ): >HRX_HUMAN
LPKGNKEDSLKKIKRT

SEQ ID NO: 26121 - protein, 16 aa, Homo sapiens
  ( 245 )...( 260 ): >HRX_HUMAN
PKGNKEDSLKKIKRTP

SEQ ID NO: 26122 - protein, 16 aa, Homo sapiens
  ( 246 )...( 261 ): >HRX_HUMAN
KGNKEDSLKKIKRTPS

SEQ ID NO: 26123 - protein, 16 aa, Homo sapiens
  ( 252 )...( 267 ): >HRX_HUMAN
SLKKIKRTPSATFQQA

SEQ ID NO: 26124 - protein, 16 aa, Homo sapiens
  ( 253 )...( 268 ): >HRX_HUMAN
LKKIKRTPSATFQQAT

SEQ ID NO: 26125 - protein, 16 aa, Homo sapiens
  ( 254 )...( 269 ): >HRX_HUMAN
KKIKRTPSATFQQATK

SEQ ID NO: 26126 - protein, 16 aa, Homo sapiens
  ( 255 )...( 270 ): >HRX_HUMAN
KIKRTPSATFQQATKI

SEQ ID NO: 26127 - protein, 16 aa, Homo sapiens
  ( 256 )...( 271 ): >HRX_HUMAN
IKRTPSATFQQATKIK

SEQ ID NO: 26128 - protein, 16 aa, Homo sapiens
  ( 257 )...( 272 ): >HRX_HUMAN
KRTPSATFQQATKIKK

SEQ ID NO: 26129 - protein, 16 aa, Homo sapiens
  ( 258 )...( 273 ): >HRX_HUMAN
RTPSATFQQATKIKKL

SEQ ID NO: 26130 - protein, 16 aa, Homo sapiens
  ( 259 )...( 274 ): >HRX_HUMAN
TPSATFQQATKIKKLR

SEQ ID NO: 26131 - protein, 16 aa, Homo sapiens
  ( 260 )...( 275 ): >HRX_HUMAN
PSATFQQATKIKKLRA

SEQ ID NO: 26132 - protein, 16 aa, Homo sapiens
  ( 261 )...( 276 ): >HRX_HUMAN
SATFQQATKIKKLRAG

SEQ ID NO: 26133 - protein, 16 aa, Homo sapiens
  ( 262 )...( 277 ): >HRX_HUMAN
ATFQQATKIKKLRAGK

SEQ ID NO: 26134 - protein, 16 aa, Homo sapiens
  ( 263 )...( 278 ): >HRX_HUMAN
TFQQATKIKKLRAGKL

SEQ ID NO: 26135 - protein, 16 aa, Homo sapiens
  ( 264 )...( 279 ): >HRX_HUMAN
FQQATKIKKLRAGKLS

SEQ ID NO: 26136 - protein, 16 aa, Homo sapiens
  ( 265 )...( 280 ): >HRX_HUMAN
QQATKIKKLRAGKLSP

SEQ ID NO: 26137 - protein, 16 aa, Homo sapiens
  ( 266 )...( 281 ): >HRX_HUMAN
QATKIKKLRAGKLSPL

SEQ ID NO: 26138 - protein, 16 aa, Homo sapiens
  ( 267 )...( 282 ): >HRX_HUMAN
ATKIKKLRAGKLSPLK

SEQ ID NO: 26139 - protein, 16 aa, Homo sapiens
  ( 268 )...( 283 ): >HRX_HUMAN
TKIKKLRAGKLSPLKS

SEQ ID NO: 26140 - protein, 16 aa, Homo sapiens
  ( 269 )...( 284 ): >HRX_HUMAN
KIKKLRAGKLSPLKSK

SEQ ID NO: 26141 - protein, 16 aa, Homo sapiens
  ( 270 )...( 285 ): >HRX_HUMAN
IKKLRAGKLSPLKSKF

SEQ ID NO: 26142 - protein, 16 aa, Homo sapiens
  ( 271 )...( 286 ): >HRX_HUMAN
KKLRAGKLSPLKSKFK

SEQ ID NO: 26143 - protein, 16 aa, Homo sapiens
  ( 272 )...( 287 ): >HRX_HUMAN
KLRAGKLSPLKSKFKT

SEQ ID NO: 26144 - protein, 16 aa, Homo sapiens
  ( 273 )...( 288 ): >HRX_HUMAN
LRAGKLSPLKSKFKTG

SEQ ID NO: 26145 - protein, 16 aa, Homo sapiens
  ( 274 )...( 289 ): >HRX_HUMAN
RAGKLSPLKSKFKTGK

SEQ ID NO: 26146 - protein, 16 aa, Homo sapiens
  ( 275 )...( 290 ): >HRX_HUMAN
AGKLSPLKSKFKTGKL

SEQ ID NO: 26147 - protein, 16 aa, Homo sapiens
  ( 276 )...( 291 ): >HRX_HUMAN
GKLSPLKSKFKTGKLQ

SEQ ID NO: 26148 - protein, 16 aa, Homo sapiens
  ( 277 )...( 292 ): >HRX_HUMAN
KLSPLKSKFKTGKLQI

SEQ ID NO: 26149 - protein, 16 aa, Homo sapiens
  ( 278 )...( 293 ): >HRX_HUMAN
LSPLKSKFKTGKLQIG

SEQ ID NO: 26150 - protein, 16 aa, Homo sapiens
  ( 279 )...( 294 ): >HRX_HUMAN
SPLKSKFKTGKLQIGR

SEQ ID NO: 26151 - protein, 16 aa, Homo sapiens
  ( 280 )...( 295 ): >HRX_HUMAN
PLKSKFKTGKLQIGRK

SEQ ID NO: 26152 - protein, 16 aa, Homo sapiens
  ( 281 )...( 296 ): >HRX_HUMAN
LKSKFKTGKLQIGRKG

SEQ ID NO: 26153 - protein, 16 aa, Homo sapiens
  ( 282 )...( 297 ): >HRX_HUMAN
KSKFKTGKLQIGRKGV

SEQ ID NO: 26154 - protein, 16 aa, Homo sapiens
  ( 283 )...( 298 ): >HRX_HUMAN
SKFKTGKLQIGRKGVQ

SEQ ID NO: 26155 - protein, 16 aa, Homo sapiens
  ( 284 )...( 299 ): >HRX_HUMAN
KFKTGKLQIGRKGVQI

SEQ ID NO: 26156 - protein, 16 aa, Homo sapiens
  ( 285 )...( 300 ): >HRX_HUMAN
FKTGKLQIGRKGVQIV

SEQ ID NO: 26157 - protein, 16 aa, Homo sapiens
  ( 286 )...( 301 ): >HRX_HUMAN
KTGKLQIGRKGVQIVR

SEQ ID NO: 26158 - protein, 16 aa, Homo sapiens
  ( 287 )...( 302 ): >HRX_HUMAN
TGKLQIGRKGVQIVRR

SEQ ID NO: 26159 - protein, 16 aa, Homo sapiens
  ( 295 )...( 310 ): >HRX_HUMAN
KGVQIVRRRGRPPSTE

SEQ ID NO: 26160 - protein, 16 aa, Homo sapiens
  ( 296 )...( 311 ): >HRX_HUMAN
GVQIVRRRGRPPSTER

SEQ ID NO: 26161 - protein, 16 aa, Homo sapiens
  ( 297 )...( 312 ): >HRX_HUMAN
VQIVRRRGRPPSTERI

SEQ ID NO: 26162 - protein, 16 aa, Homo sapiens
  ( 299 )...( 314 ): >HRX_HUMAN
IVRRRGRPPSTERIKT

SEQ ID NO: 26163 - protein, 16 aa, Homo sapiens
  ( 302 )...( 317 ): >HRX_HUMAN
RRGRPPSTERIKTPSG

SEQ ID NO: 26164 - protein, 16 aa, Homo sapiens
  ( 303 )...( 318 ): >HRX_HUMAN
RGRPPSTERIKTPSGL

SEQ ID NO: 26165 - protein, 16 aa, Homo sapiens
  ( 339 )...( 354 ): >HRX_HUMAN
PLTKEDKTVVRQSPRR

SEQ ID NO: 26166 - protein, 16 aa, Homo sapiens
  ( 340 )...( 355 ): >HRX_HUMAN
LTKEDKTVVRQSPRRI

SEQ ID NO: 26167 - protein, 16 aa, Homo sapiens
  ( 341 )...( 356 ): >HRX_HUMAN
TKEDKTVVRQSPRRIK

SEQ ID NO: 26168 - protein, 16 aa, Homo sapiens
  ( 343 )...( 358 ): >HRX_HUMAN
EDKTVVRQSPRRIKPV

SEQ ID NO: 26169 - protein, 16 aa, Homo sapiens
  ( 345 )...( 360 ): >HRX_HUMAN
KTVVRQSPRRIKPVRI

SEQ ID NO: 26170 - protein, 16 aa, Homo sapiens
  ( 346 )...( 361 ): >HRX_HUMAN
TVVRQSPRRIKPVRII

SEQ ID NO: 26171 - protein, 16 aa, Homo sapiens
  ( 347 )...( 362 ): >HRX_HUMAN
VVRQSPRRIKPVRIIP

SEQ ID NO: 26172 - protein, 16 aa, Homo sapiens
  ( 348 )...( 363 ): >HRX_HUMAN
VRQSPRRIKPVRIIPS

SEQ ID NO: 26173 - protein, 16 aa, Homo sapiens
  ( 350 )...( 365 ): >HRX_HUMAN
QSPRRIKPVRIIPSSK

SEQ ID NO: 26174 - protein, 16 aa, Homo sapiens
  ( 354 )...( 369 ): >HRX_HUMAN
RIKPVRIIPSSKRTDA

SEQ ID NO: 26175 - protein, 16 aa, Homo sapiens
  ( 355 )...( 370 ): >HRX_HUMAN
IKPVRIIPSSKRTDAT

SEQ ID NO: 26176 - protein, 16 aa, Homo sapiens
  ( 356 )...( 371 ): >HRX_HUMAN
KPVRIIPSSKRTDATI

SEQ ID NO: 26177 - protein, 16 aa, Homo sapiens
  ( 358 )...( 373 ): >HRX_HUMAN
VRIIPSSKRTDATIAK

SEQ ID NO: 26178 - protein, 16 aa, Homo sapiens
  ( 359 )...( 374 ): >HRX_HUMAN
RIIPSSKRTDATIAKQ

SEQ ID NO: 26179 - protein, 16 aa, Homo sapiens
  ( 363 )...( 378 ): >HRX_HUMAN
SSKRTDATIAKQLLQR

SEQ ID NO: 26180 - protein, 16 aa, Homo sapiens
  ( 364 )...( 379 ): >HRX_HUMAN
SKRTDATIAKQLLQRA

SEQ ID NO: 26181 - protein, 16 aa, Homo sapiens
  ( 365 )...( 380 ): >HRX_HUMAN
KRTDATIAKQLLQRAK

SEQ ID NO: 26182 - protein, 16 aa, Homo sapiens
  ( 366 )...( 381 ): >HRX_HUMAN
RTDATIAKQLLQRAKK

SEQ ID NO: 26183 - protein, 16 aa, Homo sapiens
  ( 367 )...( 382 ): >HRX_HUMAN
TDATIAKQLLQRAKKG

SEQ ID NO: 26184 - protein, 16 aa, Homo sapiens
  ( 368 )...( 383 ): >HRX_HUMAN
DATIAKQLLQRAKKGA

SEQ ID NO: 26185 - protein, 16 aa, Homo sapiens
  ( 369 )...( 384 ): >HRX_HUMAN
ATIAKQLLQRAKKGAQ

SEQ ID NO: 26186 - protein, 16 aa, Homo sapiens
  ( 370 )...( 385 ): >HRX_HUMAN
TIAKQLLQRAKKGAQK

SEQ ID NO: 26187 - protein, 16 aa, Homo sapiens
  ( 371 )...( 386 ): >HRX_HUMAN
IAKQLLQRAKKGAQKK

SEQ ID NO: 26188 - protein, 16 aa, Homo sapiens
  ( 372 )...( 387 ): >HRX_HUMAN
AKQLLQRAKKGAQKKI

SEQ ID NO: 26189 - protein, 16 aa, Homo sapiens
  ( 373 )...( 388 ): >HRX_HUMAN
KQLLQRAKKGAQKKIE

SEQ ID NO: 26190 - protein, 16 aa, Homo sapiens
  ( 374 )...( 389 ): >HRX_HUMAN
QLLQRAKKGAQKKIEK

SEQ ID NO: 26191 - protein, 16 aa, Homo sapiens
  ( 375 )...( 390 ): >HRX_HUMAN
LLQRAKKGAQKKIEKE

SEQ ID NO: 26192 - protein, 16 aa, Homo sapiens
  ( 376 )...( 391 ): >HRX_HUMAN
LQRAKKGAQKKIEKEA

SEQ ID NO: 26193 - protein, 16 aa, Homo sapiens
  ( 377 )...( 392 ): >HRX_HUMAN
QRAKKGAQKKIEKEAA

SEQ ID NO: 26194 - protein, 16 aa, Homo sapiens
  ( 378 )...( 393 ): >HRX_HUMAN
RAKKGAQKKIEKEAAQ

SEQ ID NO: 26195 - protein, 16 aa, Homo sapiens
  ( 383 )...( 398 ): >HRX_HUMAN
AQKKIEKEAAQLQGRK

SEQ ID NO: 26196 - protein, 16 aa, Homo sapiens
  ( 384 )...( 399 ): >HRX_HUMAN
QKKIEKEAAQLQGRKV

SEQ ID NO: 26197 - protein, 16 aa, Homo sapiens
  ( 385 )...( 400 ): >HRX_HUMAN
KKIEKEAAQLQGRKVK

SEQ ID NO: 26198 - protein, 16 aa, Homo sapiens
  ( 386 )...( 401 ): >HRX_HUMAN
KIEKEAAQLQGRKVKT

SEQ ID NO: 26199 - protein, 16 aa, Homo sapiens
  ( 389 )...( 404 ): >HRX_HUMAN
KEAAQLQGRKVKTQVK

SEQ ID NO: 26200 - protein, 16 aa, Homo sapiens
  ( 390 )...( 405 ): >HRX_HUMAN
EAAQLQGRKVKTQVKN

SEQ ID NO: 26201 - protein, 16 aa, Homo sapiens
  ( 391 )...( 406 ): >HRX_HUMAN
AAQLQGRKVKTQVKNI

SEQ ID NO: 26202 - protein, 16 aa, Homo sapiens
  ( 392 )...( 407 ): >HRX_HUMAN
AQLQGRKVKTQVKNIR

SEQ ID NO: 26203 - protein, 16 aa, Homo sapiens
  ( 393 )...( 408 ): >HRX_HUMAN
QLQGRKVKTQVKNIRQ

SEQ ID NO: 26204 - protein, 16 aa, Homo sapiens
  ( 394 )...( 409 ): >HRX_HUMAN
LQGRKVKTQVKNIRQF

SEQ ID NO: 26205 - protein, 16 aa, Homo sapiens
  ( 395 )...( 410 ): >HRX_HUMAN
QGRKVKTQVKNIRQFI

SEQ ID NO: 26206 - protein, 16 aa, Homo sapiens
  ( 396 )...( 411 ): >HRX_HUMAN
GRKVKTQVKNIRQFIM

SEQ ID NO: 26207 - protein, 16 aa, Homo sapiens
  ( 398 )...( 413 ): >HRX_HUMAN
KVKTQVKNIRQFIMPV

SEQ ID NO: 26208 - protein, 16 aa, Homo sapiens
  ( 399 )...( 414 ): >HRX_HUMAN
VKTQVKNIRQFIMPVV

SEQ ID NO: 26209 - protein, 16 aa, Homo sapiens
  ( 400 )...( 415 ): >HRX_HUMAN
KTQVKNIRQFIMPVVS

SEQ ID NO: 26210 - protein, 16 aa, Homo sapiens
  ( 411 )...( 426 ): >HRX_HUMAN
MPVVSAISSRIIKTPR

SEQ ID NO: 26211 - protein, 16 aa, Homo sapiens
  ( 412 )...( 427 ): >HRX_HUMAN
PVVSAISSRIIKTPRR

SEQ ID NO: 26212 - protein, 16 aa, Homo sapiens
  ( 413 )...( 428 ): >HRX_HUMAN
VVSAISSRIIKTPRRF

SEQ ID NO: 26213 - protein, 16 aa, Homo sapiens
  ( 414 )...( 429 ): >HRX_HUMAN
VSAISSRIIKTPRRFI

SEQ ID NO: 26214 - protein, 16 aa, Homo sapiens
  ( 415 )...( 430 ): >HRX_HUMAN
SAISSRIIKTPRRFIE

SEQ ID NO: 26215 - protein, 16 aa, Homo sapiens
  ( 528 )...( 543 ): >HRX_HUMAN
SRRYSVSERSFGSRTT

SEQ ID NO: 26216 - protein, 16 aa, Homo sapiens
  ( 530 )...( 545 ): >HRX_HUMAN
RYSVSERSFGSRTTKK

SEQ ID NO: 26217 - protein, 16 aa, Homo sapiens
  ( 536 )...( 551 ): >HRX_HUMAN
RSFGSRTTKKLSTLQS

SEQ ID NO: 26218 - protein, 16 aa, Homo sapiens
  ( 598 )...( 613 ): >HRX_HUMAN
PASTAPMQGKRKSILR

SEQ ID NO: 26219 - protein, 16 aa, Homo sapiens
  ( 599 )...( 614 ): >HRX_HUMAN
ASTAPMQGKRKSILRE

SEQ ID NO: 26220 - protein, 16 aa, Homo sapiens
  ( 600 )...( 615 ): >HRX_HUMAN
STAPMQGKRKSILREP

SEQ ID NO: 26221 - protein, 16 aa, Homo sapiens
  ( 601 )...( 616 ): >HRX_HUMAN
TAPMQGKRKSILREPT

SEQ ID NO: 26222 - protein, 16 aa, Homo sapiens
  ( 602 )...( 617 ): >HRX_HUMAN
APMQGKRKSILREPTF

SEQ ID NO: 26223 - protein, 16 aa, Homo sapiens
  ( 630 )...( 645 ): >HRX_HUMAN
QYFSSAKYAKEGLIRK

SEQ ID NO: 26224 - protein, 16 aa, Homo sapiens
  ( 725 )...( 740 ): >HRX_HUMAN
GTSSSGVSNRKRKRKV

SEQ ID NO: 26225 - protein, 16 aa, Homo sapiens
  ( 726 )...( 741 ): >HRX_HUMAN
TSSSGVSNRKRKRKVF

SEQ ID NO: 26226 - protein, 16 aa, Homo sapiens
  ( 727 )...( 742 ): >HRX_HUMAN
SSSGVSNRKRKRKVFS

SEQ ID NO: 26227 - protein, 16 aa, Homo sapiens
  ( 729 )...( 744 ): >HRX_HUMAN
SGVSNRKRKRKVFSPI

SEQ ID NO: 26228 - protein, 16 aa, Homo sapiens
  ( 951 )...( 966 ): >HRX_HUMAN
GDTTAVKTKILIKKGR

SEQ ID NO: 26229 - protein, 16 aa, Homo sapiens
  ( 952 )...( 967 ): >HRX_HUMAN
DTTAVKTKILIKKGRG

SEQ ID NO: 26230 - protein, 16 aa, Homo sapiens
  ( 953 )...( 968 ): >HRX_HUMAN
TTAVKTKILIKKGRGN

SEQ ID NO: 26231 - protein, 16 aa, Homo sapiens
  ( 954 )...( 969 ): >HRX_HUMAN
TAVKTKILIKKGRGNL

SEQ ID NO: 26232 - protein, 16 aa, Homo sapiens
  ( 955 )...( 970 ): >HRX_HUMAN
AVKTKILIKKGRGNLE

SEQ ID NO: 26233 - protein, 16 aa, Homo sapiens
  ( 956 )...( 971 ): >HRX_HUMAN
VKTKILIKKGRGNLEK

SEQ ID NO: 26234 - protein, 16 aa, Homo sapiens
  ( 957 )...( 972 ): >HRX_HUMAN
KTKILIKKGRGNLEKT

SEQ ID NO: 26235 - protein, 16 aa, Homo sapiens
  ( 958 )...( 973 ): >HRX_HUMAN
TKILIKKGRGNLEKTN

SEQ ID NO: 26236 - protein, 16 aa, Homo sapiens
  ( 959 )...( 974 ): >HRX_HUMAN
KILIKKGRGNLEKTNL

SEQ ID NO: 26237 - protein, 16 aa, Homo sapiens
  ( 1015 )...( 1030 ): >HRX_HUMAN
KLPMTDKRVASLLKKA

SEQ ID NO: 26238 - protein, 16 aa, Homo sapiens
  ( 1016 )...( 1031 ): >HRX_HUMAN
LPMTDKRVASLLKKAK

SEQ ID NO: 26239 - protein, 16 aa, Homo sapiens
  ( 1017 )...( 1032 ): >HRX_HUMAN
PMTDKRVASLLKKAKA

SEQ ID NO: 26240 - protein, 16 aa, Homo sapiens
  ( 1018 )...( 1033 ): >HRX_HUMAN
MTDKRVASLLKKAKAQ

SEQ ID NO: 26241 - protein, 16 aa, Homo sapiens
  ( 1019 )...( 1034 ): >HRX_HUMAN
TDKRVASLLKKAKAQL

SEQ ID NO: 26242 - protein, 16 aa, Homo sapiens
  ( 1020 )...( 1035 ): >HRX_HUMAN
DKRVASLLKKAKAQLC

SEQ ID NO: 26243 - protein, 16 aa, Homo sapiens
  ( 1021 )...( 1036 ): >HRX_HUMAN
KRVASLLKKAKAQLCK

SEQ ID NO: 26244 - protein, 16 aa, Homo sapiens
  ( 1022 )...( 1037 ): >HRX_HUMAN
RVASLLKKAKAQLCKI

SEQ ID NO: 26245 - protein, 16 aa, Homo sapiens
  ( 1024 )...( 1039 ): >HRX_HUMAN
ASLLKKAKAQLCKIEK

SEQ ID NO: 26246 - protein, 16 aa, Homo sapiens
  ( 1025 )...( 1040 ): >HRX_HUMAN
SLLKKAKAQLCKIEKS

SEQ ID NO: 26247 - protein, 16 aa, Homo sapiens
  ( 1026 )...( 1041 ): >HRX_HUMAN
LLKKAKAQLCKIEKSK

SEQ ID NO: 26248 - protein, 16 aa, Homo sapiens
  ( 1027 )...( 1042 ): >HRX_HUMAN
LKKAKAQLCKIEKSKS

SEQ ID NO: 26249 - protein, 16 aa, Homo sapiens
  ( 1028 )...( 1043 ): >HRX_HUMAN
KKAKAQLCKIEKSKSL

SEQ ID NO: 26250 - protein, 16 aa, Homo sapiens
  ( 1029 )...( 1044 ): >HRX_HUMAN
KAKAQLCKIEKSKSLK

SEQ ID NO: 26251 - protein, 16 aa, Homo sapiens
  ( 1030 )...( 1045 ): >HRX_HUMAN
AKAQLCKIEKSKSLKQ

SEQ ID NO: 26252 - protein, 16 aa, Homo sapiens
  ( 1031 )...( 1046 ): >HRX_HUMAN
KAQLCKIEKSKSLKQT

SEQ ID NO: 26253 - protein, 16 aa, Homo sapiens
  ( 1058 )...( 1073 ): >HRX_HUMAN
SSETSVRGPRIKHVCR

SEQ ID NO: 26254 - protein, 16 aa, Homo sapiens
  ( 1059 )...( 1074 ): >HRX_HUMAN
SETSVRGPRIKHVCRR

SEQ ID NO: 26255 - protein, 16 aa, Homo sapiens
  ( 1060 )...( 1075 ): >HRX_HUMAN
ETSVRGPRIKHVCRRA

SEQ ID NO: 26256 - protein, 16 aa, Homo sapiens
  ( 1061 )...( 1076 ): >HRX_HUMAN
TSVRGPRIKHVCRRAA

SEQ ID NO: 26257 - protein, 16 aa, Homo sapiens
  ( 1062 )...( 1077 ): >HRX_HUMAN
SVRGPRIKHVCRRAAV

SEQ ID NO: 26258 - protein, 16 aa, Homo sapiens
  ( 1063 )...( 1078 ): >HRX_HUMAN
VRGPRIKHVCRRAAVA

SEQ ID NO: 26259 - protein, 16 aa, Homo sapiens
  ( 1064 )...( 1079 ): >HRX_HUMAN
RGPRIKHVCRRAAVAL

SEQ ID NO: 26260 - protein, 16 aa, Homo sapiens
  ( 1065 )...( 1080 ): >HRX_HUMAN
GPRIKHVCRRAAVALG

SEQ ID NO: 26261 - protein, 16 aa, Homo sapiens
  ( 1066 )...( 1081 ): >HRX_HUMAN
PRIKHVCRRAAVALGR

SEQ ID NO: 26262 - protein, 16 aa, Homo sapiens
  ( 1067 )...( 1082 ): >HRX_HUMAN
RIKHVCRRAAVALGRK

SEQ ID NO: 26263 - protein, 16 aa, Homo sapiens
  ( 1068 )...( 1083 ): >HRX_HUMAN
IKHVCRRAAVALGRKR

SEQ ID NO: 26264 - protein, 16 aa, Homo sapiens
  ( 1069 )...( 1084 ): >HRX_HUMAN
KHVCRRAAVALGRKRA

SEQ ID NO: 26265 - protein, 16 aa, Homo sapiens
  ( 1070 )...( 1085 ): >HRX_HUMAN
HVCRRAAVALGRKRAV

SEQ ID NO: 26266 - protein, 16 aa, Homo sapiens
  ( 1071 )...( 1086 ): >HRX_HUMAN
VCRRAAVALGRKRAVF

SEQ ID NO: 26267 - protein, 16 aa, Homo sapiens
  ( 1072 )...( 1087 ): >HRX_HUMAN
CRRAAVALGRKRAVFP

SEQ ID NO: 26268 - protein, 16 aa, Homo sapiens
  ( 1073 )...( 1088 ): >HRX_HUMAN
RRAAVALGRKRAVFPD

SEQ ID NO: 26269 - protein, 16 aa, Homo sapiens
  ( 1125 )...( 1140 ): >HRX_HUMAN
LAPPIKPIKPVTRNKA

SEQ ID NO: 26270 - protein, 16 aa, Homo sapiens
  ( 1128 )...( 1143 ): >HRX_HUMAN
PIKPIKPVTRNKAPQE

SEQ ID NO: 26271 - protein, 16 aa, Homo sapiens
  ( 1129 )...( 1144 ): >HRX_HUMAN
IKPIKPVTRNKAPQEP

SEQ ID NO: 26272 - protein, 16 aa, Homo sapiens
  ( 1132 )...( 1147 ): >HRX_HUMAN
IKPVTRNKAPQEPPVK

SEQ ID NO: 26273 - protein, 16 aa, Homo sapiens
  ( 1133 )...( 1148 ): >HRX_HUMAN
KPVTRNKAPQEPPVKK

SEQ ID NO: 26274 - protein, 16 aa, Homo sapiens
  ( 1135 )...( 1150 ): >HRX_HUMAN
VTRNKAPQEPPVKKGR

SEQ ID NO: 26275 - protein, 16 aa, Homo sapiens
  ( 1141 )...( 1156 ): >HRX_HUMAN
PQEPPVKKGRRSRRCG

SEQ ID NO: 26276 - protein, 16 aa, Homo sapiens
  ( 1143 )...( 1158 ): >HRX_HUMAN
EPPVKKGRRSRRCGQC

SEQ ID NO: 26277 - protein, 16 aa, Homo sapiens
  ( 1199 )...( 1214 ): >HRX_HUMAN
WMPSKAYLQKQAKAVK

SEQ ID NO: 26278 - protein, 16 aa, Homo sapiens
  ( 1200 )...( 1215 ): >HRX_HUMAN
MPSKAYLQKQAKAVKK

SEQ ID NO: 26279 - protein, 16 aa, Homo sapiens
  ( 1201 )...( 1216 ): >HRX_HUMAN
PSKAYLQKQAKAVKKK

SEQ ID NO: 26280 - protein, 16 aa, Homo sapiens
  ( 1202 )...( 1217 ): >HRX_HUMAN
SKAYLQKQAKAVKKKE

SEQ ID NO: 26281 - protein, 16 aa, Homo sapiens
  ( 1203 )...( 1218 ): >HRX_HUMAN
KAYLQKQAKAVKKKEK

SEQ ID NO: 26282 - protein, 16 aa, Homo sapiens
  ( 1204 )...( 1219 ): >HRX_HUMAN
AYLQKQAKAVKKKEKK

SEQ ID NO: 26283 - protein, 16 aa, Homo sapiens
  ( 1206 )...( 1221 ): >HRX_HUMAN
LQKQAKAVKKKEKKSK

SEQ ID NO: 26284 - protein, 16 aa, Homo sapiens
  ( 1207 )...( 1222 ): >HRX_HUMAN
QKQAKAVKKKEKKSKT

SEQ ID NO: 26285 - protein, 16 aa, Homo sapiens
  ( 1208 )...( 1223 ): >HRX_HUMAN
KQAKAVKKKEKKSKTS

SEQ ID NO: 26286 - protein, 16 aa, Homo sapiens
  ( 1209 )...( 1224 ): >HRX_HUMAN
QAKAVKKKEKKSKTSE

SEQ ID NO: 26287 - protein, 16 aa, Homo sapiens
  ( 1210 )...( 1225 ): >HRX_HUMAN
AKAVKKKEKKSKTSEK

SEQ ID NO: 26288 - protein, 16 aa, Homo sapiens
  ( 1211 )...( 1226 ): >HRX_HUMAN
KAVKKKEKKSKTSEKK

SEQ ID NO: 26289 - protein, 16 aa, Homo sapiens
  ( 1283 )...( 1298 ): >HRX_HUMAN
SKQATTPASRKSSKQV

SEQ ID NO: 26290 - protein, 16 aa, Homo sapiens
  ( 1284 )...( 1299 ): >HRX_HUMAN
KQATTPASRKSSKQVS

SEQ ID NO: 26291 - protein, 16 aa, Homo sapiens
  ( 1340 )...( 1355 ): >HRX_HUMAN
EQSKQKKVAPRPSIPV

SEQ ID NO: 26292 - protein, 16 aa, Homo sapiens
  ( 1341 )...( 1356 ): >HRX_HUMAN
QSKQKKVAPRPSIPVK

SEQ ID NO: 26293 - protein, 16 aa, Homo sapiens
  ( 1342 )...( 1357 ): >HRX_HUMAN
SKQKKVAPRPSIPVKQ

SEQ ID NO: 26294 - protein, 16 aa, Homo sapiens
  ( 1343 )...( 1358 ): >HRX_HUMAN
KQKKVAPRPSIPVKQK

SEQ ID NO: 26295 - protein, 16 aa, Homo sapiens
  ( 1344 )...( 1359 ): >HRX_HUMAN
QKKVAPRPSIPVKQKP

SEQ ID NO: 26296 - protein, 16 aa, Homo sapiens
  ( 1345 )...( 1360 ): >HRX_HUMAN
KKVAPRPSIPVKQKPK

SEQ ID NO: 26297 - protein, 16 aa, Homo sapiens
  ( 1346 )...( 1361 ): >HRX_HUMAN
KVAPRPSIPVKQKPKE

SEQ ID NO: 26298 - protein, 16 aa, Homo sapiens
  ( 1347 )...( 1362 ): >HRX_HUMAN
VAPRPSIPVKQKPKEK

SEQ ID NO: 26299 - protein, 16 aa, Homo sapiens
  ( 1387 )...( 1402 ): >HRX_HUMAN
NSSKQKIPADGVHRIR

SEQ ID NO: 26300 - protein, 16 aa, Homo sapiens
  ( 1388 )...( 1403 ): >HRX_HUMAN
SSKQKIPADGVHRIRV

SEQ ID NO: 26301 - protein, 16 aa, Homo sapiens
  ( 1514 )...( 1529 ): >HRX_HUMAN
YPTKPTKKKKVWICTK

SEQ ID NO: 26302 - protein, 16 aa, Homo sapiens
  ( 1515 )...( 1530 ): >HRX_HUMAN
PTKPTKKKKVWICTKC

SEQ ID NO: 26303 - protein, 16 aa, Homo sapiens
  ( 1516 )...( 1531 ): >HRX_HUMAN
TKPTKKKKVWICTKCV

SEQ ID NO: 26304 - protein, 16 aa, Homo sapiens
  ( 1517 )...( 1532 ): >HRX_HUMAN
KPTKKKKVWICTKCVR

SEQ ID NO: 26305 - protein, 16 aa, Homo sapiens
  ( 1518 )...( 1533 ): >HRX_HUMAN
PTKKKKVWICTKCVRC

SEQ ID NO: 26306 - protein, 16 aa, Homo sapiens
  ( 1519 )...( 1534 ): >HRX_HUMAN
TKKKKVWICTKCVRCK

SEQ ID NO: 26307 - protein, 16 aa, Homo sapiens
  ( 1520 )...( 1535 ): >HRX_HUMAN
KKKKVWICTKCVRCKS

SEQ ID NO: 26308 - protein, 16 aa, Homo sapiens
  ( 1649 )...( 1664 ): >HRX_HUMAN
TALLNSRTTSHLLRYR

SEQ ID NO: 26309 - protein, 16 aa, Homo sapiens
  ( 1650 )...( 1665 ): >HRX_HUMAN
ALLNSRTTSHLLRYRQ

SEQ ID NO: 26310 - protein, 16 aa, Homo sapiens
  ( 1651 )...( 1666 ): >HRX_HUMAN
LLNSRTTSHLLRYRQA

SEQ ID NO: 26311 - protein, 16 aa, Homo sapiens
  ( 1652 )...( 1667 ): >HRX_HUMAN
LNSRTTSHLLRYRQAA

SEQ ID NO: 26312 - protein, 16 aa, Homo sapiens
  ( 1654 )...( 1669 ): >HRX_HUMAN
SRTTSHLLRYRQAAKP

SEQ ID NO: 26313 - protein, 16 aa, Homo sapiens
  ( 1916 )...( 1931 ): >HRX_HUMAN
GSLKNVHMAVIRGKQL

SEQ ID NO: 26314 - protein, 16 aa, Homo sapiens
  ( 1917 )...( 1932 ): >HRX_HUMAN
SLKNVHMAVIRGKQLR

SEQ ID NO: 26315 - protein, 16 aa, Homo sapiens
  ( 1918 )...( 1933 ): >HRX_HUMAN
LKNVHMAVIRGKQLRC

SEQ ID NO: 26316 - protein, 16 aa, Homo sapiens
  ( 1919 )...( 1934 ): >HRX_HUMAN
KNVHMAVIRGKQLRCE

SEQ ID NO: 26317 - protein, 16 aa, Homo sapiens
  ( 1923 )...( 1938 ): >HRX_HUMAN
MAVIRGKQLRCEFCQK

SEQ ID NO: 26318 - protein, 16 aa, Homo sapiens
  ( 1970 )...( 1985 ): >HRX_HUMAN
KKVYCQRHRDLIKGEV

SEQ ID NO: 26319 - protein, 16 aa, Homo sapiens
  ( 2138 )...( 2153 ): >HRX_HUMAN
VISKVPRIRTPSYSPT

SEQ ID NO: 26320 - protein, 16 aa, Homo sapiens
  ( 2192 )...( 2207 ): >HRX_HUMAN
SRRHSTSSLSPQRSKL

SEQ ID NO: 26321 - protein, 16 aa, Homo sapiens
  ( 2194 )...( 2209 ): >HRX_HUMAN
RHSTSSLSPQRSKLRI

SEQ ID NO: 26322 - protein, 16 aa, Homo sapiens
  ( 2200 )...( 2215 ): >HRX_HUMAN
LSPQRSKLRIMSPMRT

SEQ ID NO: 26323 - protein, 16 aa, Homo sapiens
  ( 2201 )...( 2216 ): >HRX_HUMAN
SPQRSKLRIMSPMRTG

SEQ ID NO: 26324 - protein, 16 aa, Homo sapiens
  ( 2202 )...( 2217 ): >HRX_HUMAN
PQRSKLRIMSPMRTGN

SEQ ID NO: 26325 - protein, 16 aa, Homo sapiens
  ( 2203 )...( 2218 ): >HRX_HUMAN
QRSKLRIMSPMRTGNT

SEQ ID NO: 26326 - protein, 16 aa, Homo sapiens
  ( 2204 )...( 2219 ): >HRX_HUMAN
RSKLRIMSPMRTGNTY

SEQ ID NO: 26327 - protein, 16 aa, Homo sapiens
  ( 2206 )...( 2221 ): >HRX_HUMAN
KLRIMSPMRTGNTYSR

SEQ ID NO: 26328 - protein, 16 aa, Homo sapiens
  ( 2506 )...( 2521 ): >HRX_HUMAN
EGSAKELQAPRKRTVK

SEQ ID NO: 26329 - protein, 16 aa, Homo sapiens
  ( 2507 )...( 2522 ): >HRX_HUMAN
GSAKELQAPRKRTVKV

SEQ ID NO: 26330 - protein, 16 aa, Homo sapiens
  ( 2508 )...( 2523 ): >HRX_HUMAN
SAKELQAPRKRTVKVT

SEQ ID NO: 26331 - protein, 16 aa, Homo sapiens
  ( 2509 )...( 2524 ): >HRX_HUMAN
AKELQAPRKRTVKVTL

SEQ ID NO: 26332 - protein, 16 aa, Homo sapiens
  ( 2510 )...( 2525 ): >HRX_HUMAN
KELQAPRKRTVKVTLT

SEQ ID NO: 26333 - protein, 16 aa, Homo sapiens
  ( 2511 )...( 2526 ): >HRX_HUMAN
ELQAPRKRTVKVTLTP

SEQ ID NO: 26334 - protein, 16 aa, Homo sapiens
  ( 2512 )...( 2527 ): >HRX_HUMAN
LQAPRKRTVKVTLTPL

SEQ ID NO: 26335 - protein, 16 aa, Homo sapiens
  ( 2513 )...( 2528 ): >HRX_HUMAN
QAPRKRTVKVTLTPLK

SEQ ID NO: 26336 - protein, 16 aa, Homo sapiens
  ( 2514 )...( 2529 ): >HRX_HUMAN
APRKRTVKVTLTPLKM

SEQ ID NO: 26337 - protein, 16 aa, Homo sapiens
  ( 2515 )...( 2530 ): >HRX_HUMAN
PRKRTVKVTLTPLKME

SEQ ID NO: 26338 - protein, 16 aa, Homo sapiens
  ( 2516 )...( 2531 ): >HRX_HUMAN
RKRTVKVTLTPLKMEN

SEQ ID NO: 26339 - protein, 16 aa, Homo sapiens
  ( 2650 )...( 2665 ): >HRX_HUMAN
SSTGKKRGKRSAEGQV

SEQ ID NO: 26340 - protein, 16 aa, Homo sapiens
  ( 2728 )...( 2743 ): >HRX_HUMAN
TSVTATTRKSSQIPKR

SEQ ID NO: 26341 - protein, 16 aa, Homo sapiens
  ( 2729 )...( 2744 ): >HRX_HUMAN
SVTATTRKSSQIPKRN

SEQ ID NO: 26342 - protein, 16 aa, Homo sapiens
  ( 2730 )...( 2745 ): >HRX_HUMAN
VTATTRKSSQIPKRNG

SEQ ID NO: 26343 - protein, 16 aa, Homo sapiens
  ( 2731 )...( 2746 ): >HRX_HUMAN
TATTRKSSQIPKRNGK

SEQ ID NO: 26344 - protein, 16 aa, Homo sapiens
  ( 2732 )...( 2747 ): >HRX_HUMAN
ATTRKSSQIPKRNGKE

SEQ ID NO: 26345 - protein, 16 aa, Homo sapiens
  ( 2733 )...( 2748 ): >HRX_HUMAN
TTRKSSQIPKRNGKEN

SEQ ID NO: 26346 - protein, 16 aa, Homo sapiens
  ( 2734 )...( 2749 ): >HRX_HUMAN
TRKSSQIPKRNGKENG

SEQ ID NO: 26347 - protein, 16 aa, Homo sapiens
  ( 2735 )...( 2750 ): >HRX_HUMAN
RKSSQIPKRNGKENGT

SEQ ID NO: 26348 - protein, 16 aa, Homo sapiens
  ( 3210 )...( 3225 ): >HRX_HUMAN
TVATPSSGLKKRPISR

SEQ ID NO: 26349 - protein, 16 aa, Homo sapiens
  ( 3211 )...( 3226 ): >HRX_HUMAN
VATPSSGLKKRPISRL

SEQ ID NO: 26350 - protein, 16 aa, Homo sapiens
  ( 3212 )...( 3227 ): >HRX_HUMAN
ATPSSGLKKRPISRLQ

SEQ ID NO: 26351 - protein, 16 aa, Homo sapiens
  ( 3213 )...( 3228 ): >HRX_HUMAN
TPSSGLKKRPISRLQT

SEQ ID NO: 26352 - protein, 16 aa, Homo sapiens
  ( 3214 )...( 3229 ): >HRX_HUMAN
PSSGLKKRPISRLQTR

SEQ ID NO: 26353 - protein, 16 aa, Homo sapiens
  ( 3215 )...( 3230 ): >HRX_HUMAN
SSGLKKRPISRLQTRK

SEQ ID NO: 26354 - protein, 16 aa, Homo sapiens
  ( 3216 )...( 3231 ): >HRX_HUMAN
SGLKKRPISRLQTRKN

SEQ ID NO: 26355 - protein, 16 aa, Homo sapiens
  ( 3222 )...( 3237 ): >HRX_HUMAN
PISRLQTRKNKKLAPS

SEQ ID NO: 26356 - protein, 16 aa, Homo sapiens
  ( 3223 )...( 3238 ): >HRX_HUMAN
ISRLQTRKNKKLAPSS

SEQ ID NO: 26357 - protein, 16 aa, Homo sapiens
  ( 3224 )...( 3239 ): >HRX_HUMAN
SRLQTRKNKKLAPSST

SEQ ID NO: 26358 - protein, 16 aa, Homo sapiens
  ( 3225 )...( 3240 ): >HRX_HUMAN
RLQTRKNKKLAPSSTP

SEQ ID NO: 26359 - protein, 16 aa, Homo sapiens
  ( 3226 )...( 3241 ): >HRX_HUMAN
LQTRKNKKLAPSSTPS

SEQ ID NO: 26360 - protein, 16 aa, Homo sapiens
  ( 3275 )...( 3290 ): >HRX_HUMAN
NTSSHRTVPNIIKRSK

SEQ ID NO: 26361 - protein, 16 aa, Homo sapiens
  ( 3276 )...( 3291 ): >HRX_HUMAN
TSSHRTVPNIIKRSKS

SEQ ID NO: 26362 - protein, 16 aa, Homo sapiens
  ( 3277 )...( 3292 ): >HRX_HUMAN
SSHRTVPNIIKRSKSS

SEQ ID NO: 26363 - protein, 16 aa, Homo sapiens
  ( 3278 )...( 3293 ): >HRX_HUMAN
SHRTVPNIIKRSKSSI

SEQ ID NO: 26364 - protein, 16 aa, Homo sapiens
  ( 3279 )...( 3294 ): >HRX_HUMAN
HRTVPNIIKRSKSSIM

SEQ ID NO: 26365 - protein, 16 aa, Homo sapiens
  ( 3280 )...( 3295 ): >HRX_HUMAN
RTVPNIIKRSKSSIMY

SEQ ID NO: 26366 - protein, 16 aa, Homo sapiens
  ( 3530 )...( 3545 ): >HRX_HUMAN
VPGPTKPKPKTKRFQL

SEQ ID NO: 26367 - protein, 16 aa, Homo sapiens
  ( 3532 )...( 3547 ): >HRX_HUMAN
GPTKPKPKTKRFQLPL

SEQ ID NO: 26368 - protein, 16 aa, Homo sapiens
  ( 3537 )...( 3552 ): >HRX_HUMAN
KPKTKRFQLPLDKGNG

SEQ ID NO: 26369 - protein, 16 aa, Homo sapiens
  ( 3538 )...( 3553 ): >HRX_HUMAN
PKTKRFQLPLDKGNGK

SEQ ID NO: 26370 - protein, 16 aa, Homo sapiens
  ( 3539 )...( 3554 ): >HRX_HUMAN
KTKRFQLPLDKGNGKK

SEQ ID NO: 26371 - protein, 16 aa, Homo sapiens
  ( 3542 )...( 3557 ): >HRX_HUMAN
RFQLPLDKGNGKKHKV

SEQ ID NO: 26372 - protein, 16 aa, Homo sapiens
  ( 3546 )...( 3561 ): >HRX_HUMAN
PLDKGNGKKHKVSHLR

SEQ ID NO: 26373 - protein, 16 aa, Homo sapiens
  ( 3549 )...( 3564 ): >HRX_HUMAN
KGNGKKHKVSHLRTSS

SEQ ID NO: 26374 - protein, 16 aa, Homo sapiens
  ( 3654 )...( 3669 ): >HRX_HUMAN
QKRKESITEKKPKKGL

SEQ ID NO: 26375 - protein, 16 aa, Homo sapiens
  ( 3655 )...( 3670 ): >HRX_HUMAN
KRKESITEKKPKKGLV

SEQ ID NO: 26376 - protein, 16 aa, Homo sapiens
  ( 3656 )...( 3671 ): >HRX_HUMAN
RKESITEKKPKKGLVF

SEQ ID NO: 26377 - protein, 16 aa, Homo sapiens
  ( 3696 )...( 3711 ): >HRX_HUMAN
KVQEARSNARLKQLSF

SEQ ID NO: 26378 - protein, 16 aa, Homo sapiens
  ( 3703 )...( 3718 ): >HRX_HUMAN
NARLKQLSFAGVNGLR

SEQ ID NO: 26379 - protein, 16 aa, Homo sapiens
  ( 3704 )...( 3719 ): >HRX_HUMAN
ARLKQLSFAGVNGLRM

SEQ ID NO: 26380 - protein, 16 aa, Homo sapiens
  ( 3705 )...( 3720 ): >HRX_HUMAN
RLKQLSFAGVNGLRML

SEQ ID NO: 26381 - protein, 16 aa, Homo sapiens
  ( 3817 )...( 3832 ): >HRX_HUMAN
PMRFRHLKKTSKEAVG

SEQ ID NO: 26382 - protein, 16 aa, Homo sapiens
  ( 3818 )...( 3833 ): >HRX_HUMAN
MRFRHLKKTSKEAVGV

SEQ ID NO: 26383 - protein, 16 aa, Homo sapiens
  ( 3819 )...( 3834 ): >HRX_HUMAN
RFRHLKKTSKEAVGVY

SEQ ID NO: 26384 - protein, 16 aa, Homo sapiens
  ( 3820 )...( 3835 ): >HRX_HUMAN
FRHLKKTSKEAVGVYR

SEQ ID NO: 26385 - protein, 16 aa, Homo sapiens
  ( 3821 )...( 3836 ): >HRX_HUMAN
RHLKKTSKEAVGVYRS

SEQ ID NO: 26386 - protein, 16 aa, Homo sapiens
  ( 3922 )...( 3937 ): >HRX_HUMAN
GQKHIVIFAMRKIYRG

SEQ ID NO: 26387 - protein, 16 aa, Homo sapiens
  ( 3923 )...( 3938 ): >HRX_HUMAN
QKHIVIFAMRKIYRGE

SEQ ID NO: 26388 - protein, 16 aa, Homo sapiens
  ( 172 )...( 187 ): >HTF4_HUMAN
SAALDPLQAKKVRKVP

SEQ ID NO: 26389 - protein, 16 aa, Homo sapiens
  ( 173 )...( 188 ): >HTF4_HUMAN
AALDPLQAKKVRKVPP

SEQ ID NO: 26390 - protein, 16 aa, Homo sapiens
  ( 174 )...( 189 ): >HTF4_HUMAN
ALDPLQAKKVRKVPPG

SEQ ID NO: 26391 - protein, 16 aa, Homo sapiens
  ( 175 )...( 190 ): >HTF4_HUMAN
LDPLQAKKVRKVPPGL

SEQ ID NO: 26392 - protein, 16 aa, Homo sapiens
  ( 177 )...( 192 ): >HTF4_HUMAN
PLQAKKVRKVPPGLPS

SEQ ID NO: 26393 - protein, 16 aa, Homo sapiens
  ( 178 )...( 193 ): >HTF4_HUMAN
LQAKKVRKVPPGLPSS

SEQ ID NO: 26394 - protein, 16 aa, Homo sapiens
  ( 179 )...( 194 ): >HTF4_HUMAN
QAKKVRKVPPGLPSSV

SEQ ID NO: 26395 - protein, 16 aa, Homo sapiens
  ( 632 )...( 647 ): >HTF4_HUMAN
QQVRERNLNPKAACLK

SEQ ID NO: 26396 - protein, 16 aa, Homo sapiens
  ( 206 )...( 221 ): >HXA1_HUMAN
DWMKVKRNPPKTGKVG

SEQ ID NO: 26397 - protein, 16 aa, Homo sapiens
  ( 207 )...( 222 ): >HXA1_HUMAN
WMKVKRNPPKTGKVGE

SEQ ID NO: 26398 - protein, 16 aa, Homo sapiens
  ( 208 )...( 223 ): >HXA1_HUMAN
MKVKRNPPKTGKVGEY

SEQ ID NO: 26399 - protein, 16 aa, Homo sapiens
  ( 209 )...( 224 ): >HXA1_HUMAN
KVKRNPPKTGKVGEYG

SEQ ID NO: 26400 - protein, 16 aa, Homo sapiens
  ( 250 )...( 265 ): >HXA1_HUMAN
FNKYLTRARRVEIAAS

SEQ ID NO: 26401 - protein, 16 aa, Homo sapiens
  ( 251 )...( 266 ): >HXA1_HUMAN
NKYLTRARRVEIAASL

SEQ ID NO: 26402 - protein, 16 aa, Homo sapiens
  ( 252 )...( 267 ): >HXA1_HUMAN
KYLTRARRVEIAASLQ

SEQ ID NO: 26403 - protein, 16 aa, Homo sapiens
  ( 282 )...( 297 ): >HXA1_HUMAN
MKQKKREKEGLLPISP

SEQ ID NO: 26404 - protein, 16 aa, Homo sapiens
  ( 283 )...( 298 ): >HXA1_HUMAN
KQKKREKEGLLPISPA

SEQ ID NO: 26405 - protein, 16 aa, Homo sapiens
  ( 95 )...( 110 ): >HXA2_HUMAN
YPWMKEKKAAKKTALL

SEQ ID NO: 26406 - protein, 16 aa, Homo sapiens
  ( 96 )...( 111 ): >HXA2_HUMAN
PWMKEKKAAKKTALLP

SEQ ID NO: 26407 - protein, 16 aa, Homo sapiens
  ( 97 )...( 112 ): >HXA2_HUMAN
WMKEKKAAKKTALLPA

SEQ ID NO: 26408 - protein, 16 aa, Homo sapiens
  ( 98 )...( 113 ): >HXA2_HUMAN
MKEKKAAKKTALLPAA

SEQ ID NO: 26409 - protein, 16 aa, Homo sapiens
  ( 139 )...( 154 ): >HXA2_HUMAN
SGGGSRRLRTAYTNTQ

SEQ ID NO: 26410 - protein, 16 aa, Homo sapiens
  ( 140 )...( 155 ): >HXA2_HUMAN
GGGSRRLRTAYTNTQL

SEQ ID NO: 26411 - protein, 16 aa, Homo sapiens
  ( 141 )...( 156 ): >HXA2_HUMAN
GGSRRLRTAYTNTQLL

SEQ ID NO: 26412 - protein, 16 aa, Homo sapiens
  ( 165 )...( 180 ): >HXA2_HUMAN
NKYLCRPRRVEIAALL

SEQ ID NO: 26413 - protein, 16 aa, Homo sapiens
  ( 188 )...( 203 ): >HXA3_HUMAN
QASSKRARTAYTSAQL

SEQ ID NO: 26414 - protein, 16 aa, Homo sapiens
  ( 189 )...( 204 ): >HXA3_HUMAN
ASSKRARTAYTSAQLV

SEQ ID NO: 26415 - protein, 16 aa, Homo sapiens
  ( 243 )...( 258 ): >HXA3_HUMAN
RMKYKKDQKGKGMLTS

SEQ ID NO: 26416 - protein, 16 aa, Homo sapiens
  ( 244 )...( 259 ): >HXA3_HUMAN
MKYKKDQKGKGMLTSS

SEQ ID NO: 26417 - protein, 16 aa, Homo sapiens
  ( 245 )...( 260 ): >HXA3_HUMAN
KYKKDQKGKGMLTSSG

SEQ ID NO: 26418 - protein, 16 aa, Homo sapiens
  ( 185 )...( 200 ): >HXA4_HUMAN
LGLKGKEPVVYPWMKK

SEQ ID NO: 26419 - protein, 16 aa, Homo sapiens
  ( 186 )...( 201 ): >HXA4_HUMAN
GLKGKEPVVYPWMKKI

SEQ ID NO: 26420 - protein, 16 aa, Homo sapiens
  ( 211 )...( 226 ): >HXA4_HUMAN
NGGEPKRSRTAYTRQQ

SEQ ID NO: 26421 - protein, 16 aa, Homo sapiens
  ( 212 )...( 227 ): >HXA4_HUMAN
GGEPKRSRTAYTRQQV

SEQ ID NO: 26422 - protein, 16 aa, Homo sapiens
  ( 213 )...( 228 ): >HXA4_HUMAN
GEPKRSRTAYTRQQVL

SEQ ID NO: 26423 - protein, 16 aa, Homo sapiens
  ( 215 )...( 230 ): >HXA4_HUMAN
PKRSRTAYTRQQVLEL

SEQ ID NO: 26424 - protein, 16 aa, Homo sapiens
  ( 239 )...( 254 ): >HXA4_HUMAN
YLTRRRRIEIAHTLCL

SEQ ID NO: 26425 - protein, 16 aa, Homo sapiens
  ( 240 )...( 255 ): >HXA4_HUMAN
LTRRRRIEIAHTLCLS

SEQ ID NO: 26426 - protein, 16 aa, Homo sapiens
  ( 189 )...( 204 ): >HXA5_HUMAN
NIGGPEGKRARTAYTR

SEQ ID NO: 26427 - protein, 16 aa, Homo sapiens
  ( 190 )...( 205 ): >HXA5_HUMAN
IGGPEGKRARTAYTRY

SEQ ID NO: 26428 - protein, 16 aa, Homo sapiens
  ( 191 )...( 206 ): >HXA5_HUMAN
GGPEGKRARTAYTRYQ

SEQ ID NO: 26429 - protein, 16 aa, Homo sapiens
  ( 192 )...( 207 ): >HXA5_HUMAN
GPEGKRARTAYTRYQT

SEQ ID NO: 26430 - protein, 16 aa, Homo sapiens
  ( 193 )...( 208 ): >HXA5_HUMAN
PEGKRARTAYTRYQTL

SEQ ID NO: 26431 - protein, 16 aa, Homo sapiens
  ( 195 )...( 210 ): >HXA5_HUMAN
GKRARTAYTRYQTLEL

SEQ ID NO: 26432 - protein, 16 aa, Homo sapiens
  ( 219 )...( 234 ): >HXA5_HUMAN
YLTRRRRIEIAHALCL

SEQ ID NO: 26433 - protein, 16 aa, Homo sapiens
  ( 220 )...( 235 ): >HXA5_HUMAN
LTRRRRIEIAHALCLS

SEQ ID NO: 26434 - protein, 16 aa, Homo sapiens
  ( 147 )...( 162 ): >HXA6_HUMAN
AGAVYGSHGRRGRQTY

SEQ ID NO: 26435 - protein, 16 aa, Homo sapiens
  ( 148 )...( 163 ): >HXA6_HUMAN
GAVYGSHGRRGRQTYT

SEQ ID NO: 26436 - protein, 16 aa, Homo sapiens
  ( 149 )...( 164 ): >HXA6_HUMAN
AVYGSHGRRGRQTYTR

SEQ ID NO: 26437 - protein, 16 aa, Homo sapiens
  ( 150 )...( 165 ): >HXA6_HUMAN
VYGSHGRRGRQTYTRY

SEQ ID NO: 26438 - protein, 16 aa, Homo sapiens
  ( 152 )...( 167 ): >HXA6_HUMAN
GSHGRRGRQTYTRYQT

SEQ ID NO: 26439 - protein, 16 aa, Homo sapiens
  ( 155 )...( 170 ): >HXA6_HUMAN
GRRGRQTYTRYQTLEL

SEQ ID NO: 26440 - protein, 16 aa, Homo sapiens
  ( 179 )...( 194 ): >HXA6_HUMAN
YLTRRRRIEIANALCL

SEQ ID NO: 26441 - protein, 16 aa, Homo sapiens
  ( 180 )...( 195 ): >HXA6_HUMAN
LTRRRRIEIANALCLT

SEQ ID NO: 26442 - protein, 16 aa, Homo sapiens
  ( 154 )...( 169 ): >HXA7_HUMAN
YLTRRRRIEIAHALCL

SEQ ID NO: 26443 - protein, 16 aa, Homo sapiens
  ( 155 )...( 170 ): >HXA7_HUMAN
LTRRRRIEIAHALCLT

SEQ ID NO: 26444 - protein, 16 aa, Homo sapiens
  ( 308 )...( 323 ): >HXAA_HUMAN
ENAANWLTAKSGRKKR

SEQ ID NO: 26445 - protein, 16 aa, Homo sapiens
  ( 314 )...( 329 ): >HXAA_HUMAN
LTAKSGRKKRCPYTKH

SEQ ID NO: 26446 - protein, 16 aa, Homo sapiens
  ( 232 )...( 247 ): >HXAB_HUMAN
KAGGSSGQRTRKKRCP

SEQ ID NO: 26447 - protein, 16 aa, Homo sapiens
  ( 234 )...( 249 ): >HXAB_HUMAN
GGSSGQRTRKKRCPYT

SEQ ID NO: 26448 - protein, 16 aa, Homo sapiens
  ( 235 )...( 250 ): >HXAB_HUMAN
GSSGQRTRKKRCPYTK

SEQ ID NO: 26449 - protein, 16 aa, Homo sapiens
  ( 322 )...( 337 ): >HXAD_HUMAN
GRKKRVPYTKVQLKEL

SEQ ID NO: 26450 - protein, 16 aa, Homo sapiens
  ( 346 )...( 361 ): >HXAD_HUMAN
FITKDKRRRISATTNL

SEQ ID NO: 26451 - protein, 16 aa, Homo sapiens
  ( 347 )...( 362 ): >HXAD_HUMAN
ITKDKRRRISATTNLS

SEQ ID NO: 26452 - protein, 16 aa, Homo sapiens
  ( 348 )...( 363 ): >HXAD_HUMAN
TKDKRRRISATTNLSE

SEQ ID NO: 26453 - protein, 16 aa, Homo sapiens
  ( 351 )...( 366 ): >HXAD_HUMAN
KRRRISATTNLSERQV

SEQ ID NO: 26454 - protein, 16 aa, Homo sapiens
  ( 352 )...( 367 ): >HXAD_HUMAN
RRRISATTNLSERQVT

SEQ ID NO: 26455 - protein, 16 aa, Homo sapiens
  ( 373 )...( 388 ): >HXAD_HUMAN
RRVKEKKVINKLKTTS

SEQ ID NO: 26456 - protein, 15 aa, Homo sapiens
  ( 374 )...( 389 ): >HXAD_HUMAN
RVKEKKVINKLKTTS

SEQ ID NO: 26457 - protein, 14 aa, Homo sapiens
  ( 375 )...( 390 ): >HXAD_HUMAN
VKEKKVINKLKTTS

SEQ ID NO: 26458 - protein, 13 aa, Homo sapiens
  ( 376 )...( 391 ): >HXAD_HUMAN
KEKKVINKLKTTS

SEQ ID NO: 26459 - protein, 16 aa, Homo sapiens
  ( 183 )...( 198 ): >HXB1_HUMAN
MKVKRNPPKTAKVSEP

SEQ ID NO: 26460 - protein, 16 aa, Homo sapiens
  ( 184 )...( 199 ): >HXB1_HUMAN
KVKRNPPKTAKVSEPG

SEQ ID NO: 26461 - protein, 16 aa, Homo sapiens
  ( 224 )...( 239 ): >HXB1_HUMAN
FNKYLSRARRVEIAAT

SEQ ID NO: 26462 - protein, 16 aa, Homo sapiens
  ( 225 )...( 240 ): >HXB1_HUMAN
NKYLSRARRVEIAATL

SEQ ID NO: 26463 - protein, 16 aa, Homo sapiens
  ( 256 )...( 271 ): >HXB1_HUMAN
MKQKKREREGGRVPPA

SEQ ID NO: 26464 - protein, 16 aa, Homo sapiens
  ( 257 )...( 272 ): >HXB1_HUMAN
KQKKREREGGRVPPAP

SEQ ID NO: 26465 - protein, 16 aa, Homo sapiens
  ( 258 )...( 273 ): >HXB1_HUMAN
QKKREREGGRVPPAPP

SEQ ID NO: 26466 - protein, 16 aa, Homo sapiens
  ( 55 )...( 70 ): >HXB2_HUMAN
SLQPGASTLQRPRSQK

SEQ ID NO: 26467 - protein, 16 aa, Homo sapiens
  ( 56 )...( 71 ): >HXB2_HUMAN
LQPGASTLQRPRSQKR

SEQ ID NO: 26468 - protein, 16 aa, Homo sapiens
  ( 57 )...( 72 ): >HXB2_HUMAN
QPGASTLQRPRSQKRA

SEQ ID NO: 26469 - protein, 16 aa, Homo sapiens
  ( 58 )...( 73 ): >HXB2_HUMAN
PGASTLQRPRSQKRAE

SEQ ID NO: 26470 - protein, 16 aa, Homo sapiens
  ( 139 )...( 154 ): >HXB2_HUMAN
GGGGARRLRTAYTNTQ

SEQ ID NO: 26471 - protein, 16 aa, Homo sapiens
  ( 140 )...( 155 ): >HXB2_HUMAN
GGGARRLRTAYTNTQL

SEQ ID NO: 26472 - protein, 16 aa, Homo sapiens
  ( 141 )...( 156 ): >HXB2_HUMAN
GGARRLRTAYTNTQLL

SEQ ID NO: 26473 - protein, 16 aa, Homo sapiens
  ( 165 )...( 180 ): >HXB2_HUMAN
NKYLCRPRRVEIAALL

SEQ ID NO: 26474 - protein, 16 aa, Homo sapiens
  ( 186 )...( 201 ): >HXB3_HUMAN
AASKRARTAYTSAQLV

SEQ ID NO: 26475 - protein, 16 aa, Homo sapiens
  ( 240 )...( 255 ): >HXB3_HUMAN
RMKYKKDQKAKGLASS

SEQ ID NO: 26476 - protein, 16 aa, Homo sapiens
  ( 157 )...( 172 ): >HXB4_HUMAN
YAGGEPKRSRTAYTRQ

SEQ ID NO: 26477 - protein, 16 aa, Homo sapiens
  ( 158 )...( 173 ): >HXB4_HUMAN
AGGEPKRSRTAYTRQQ

SEQ ID NO: 26478 - protein, 16 aa, Homo sapiens
  ( 159 )...( 174 ): >HXB4_HUMAN
GGEPKRSRTAYTRQQV

SEQ ID NO: 26479 - protein, 16 aa, Homo sapiens
  ( 160 )...( 175 ): >HXB4_HUMAN
GEPKRSRTAYTRQQVL

SEQ ID NO: 26480 - protein, 16 aa, Homo sapiens
  ( 162 )...( 177 ): >HXB4_HUMAN
PKRSRTAYTRQQVLEL

SEQ ID NO: 26481 - protein, 16 aa, Homo sapiens
  ( 186 )...( 201 ): >HXB4_HUMAN
YLTRRRRVEIAHALCL

SEQ ID NO: 26482 - protein, 16 aa, Homo sapiens
  ( 187 )...( 202 ): >HXB4_HUMAN
LTRRRRVEIAHALCLS

SEQ ID NO: 26483 - protein, 16 aa, Homo sapiens
  ( 218 )...( 233 ): >HXB4_HUMAN
KKDHKLPNTKIRSGGA

SEQ ID NO: 26484 - protein, 16 aa, Homo sapiens
  ( 189 )...( 204 ): >HXB5_HUMAN
MTGPDGKRARTAYTRY

SEQ ID NO: 26485 - protein, 16 aa, Homo sapiens
  ( 190 )...( 205 ): >HXB5_HUMAN
TGPDGKRARTAYTRYQ

SEQ ID NO: 26486 - protein, 16 aa, Homo sapiens
  ( 191 )...( 206 ): >HXB5_HUMAN
GPDGKRARTAYTRYQT

SEQ ID NO: 26487 - protein, 16 aa, Homo sapiens
  ( 192 )...( 207 ): >HXB5_HUMAN
PDGKRARTAYTRYQTL

SEQ ID NO: 26488 - protein, 16 aa, Homo sapiens
  ( 194 )...( 209 ): >HXB5_HUMAN
GKRARTAYTRYQTLEL

SEQ ID NO: 26489 - protein, 16 aa, Homo sapiens
  ( 218 )...( 233 ): >HXB5_HUMAN
YLTRRRRIEIAHALCL

SEQ ID NO: 26490 - protein, 16 aa, Homo sapiens
  ( 219 )...( 234 ): >HXB5_HUMAN
LTRRRRIEIAHALCLS

SEQ ID NO: 26491 - protein, 16 aa, Homo sapiens
  ( 248 )...( 263 ): >HXB5_HUMAN
KWKKDNKLKSMSLATA

SEQ ID NO: 26492 - protein, 16 aa, Homo sapiens
  ( 140 )...( 155 ): >HXB6_HUMAN
SSFGPSGRRGRQTYTR

SEQ ID NO: 26493 - protein, 16 aa, Homo sapiens
  ( 141 )...( 156 ): >HXB6_HUMAN
SFGPSGRRGRQTYTRY

SEQ ID NO: 26494 - protein, 16 aa, Homo sapiens
  ( 143 )...( 158 ): >HXB6_HUMAN
GPSGRRGRQTYTRYQT

SEQ ID NO: 26495 - protein, 16 aa, Homo sapiens
  ( 144 )...( 159 ): >HXB6_HUMAN
PSGRRGRQTYTRYQTL

SEQ ID NO: 26496 - protein, 16 aa, Homo sapiens
  ( 145 )...( 160 ): >HXB6_HUMAN
SGRRGRQTYTRYQTLE

SEQ ID NO: 26497 - protein, 16 aa, Homo sapiens
  ( 146 )...( 161 ): >HXB6_HUMAN
GRRGRQTYTRYQTLEL

SEQ ID NO: 26498 - protein, 16 aa, Homo sapiens
  ( 170 )...( 185 ): >HXB6_HUMAN
YLTRRRRIEIAHALCL

SEQ ID NO: 26499 - protein, 16 aa, Homo sapiens
  ( 171 )...( 186 ): >HXB6_HUMAN
LTRRRRIEIAHALCLT

SEQ ID NO: 26500 - protein, 16 aa, Homo sapiens
  ( 130 )...( 145 ): >HXB7_HUMAN
MRSSGTDRKRGRQTYT

SEQ ID NO: 26501 - protein, 16 aa, Homo sapiens
  ( 161 )...( 176 ): >HXB7_HUMAN
YLTRRRRIEIAHTLCL

SEQ ID NO: 26502 - protein, 16 aa, Homo sapiens
  ( 162 )...( 177 ): >HXB7_HUMAN
LTRRRRIEIAHTLCLT

SEQ ID NO: 26503 - protein, 16 aa, Homo sapiens
  ( 188 )...( 203 ): >HXB7_HUMAN
RRMKWKKENKTAGPGT

SEQ ID NO: 26504 - protein, 16 aa, Homo sapiens
  ( 189 )...( 204 ): >HXB7_HUMAN
RMKWKKENKTAGPGTT

SEQ ID NO: 26505 - protein, 16 aa, Homo sapiens
  ( 138 )...( 153 ): >HXB8_HUMAN
MRPQAAAGRRRGRQTY

SEQ ID NO: 26506 - protein, 16 aa, Homo sapiens
  ( 139 )...( 154 ): >HXB8_HUMAN
RPQAAAGRRRGRQTYS

SEQ ID NO: 26507 - protein, 16 aa, Homo sapiens
  ( 140 )...( 155 ): >HXB8_HUMAN
PQAAAGRRRGRQTYSR

SEQ ID NO: 26508 - protein, 16 aa, Homo sapiens
  ( 169 )...( 184 ): >HXB8_HUMAN
PYLTRKRRIEVSHALG

SEQ ID NO: 26509 - protein, 16 aa, Homo sapiens
  ( 170 )...( 185 ): >HXB8_HUMAN
YLTRKRRIEVSHALGL

SEQ ID NO: 26510 - protein, 16 aa, Homo sapiens
  ( 171 )...( 186 ): >HXB8_HUMAN
LTRKRRIEVSHALGLT

SEQ ID NO: 26511 - protein, 16 aa, Homo sapiens
  ( 173 )...( 188 ): >HXB8_HUMAN
RKRRIEVSHALGLTER

SEQ ID NO: 26512 - protein, 16 aa, Homo sapiens
  ( 236 )...( 251 ): >HXBD_HUMAN
AANKFITKDKRRKISA

SEQ ID NO: 26513 - protein, 16 aa, Homo sapiens
  ( 237 )...( 252 ): >HXBD_HUMAN
ANKFITKDKRRKISAA

SEQ ID NO: 26514 - protein, 16 aa, Homo sapiens
  ( 238 )...( 253 ): >HXBD_HUMAN
NKFITKDKRRKISAAT

SEQ ID NO: 26515 - protein, 16 aa, Homo sapiens
  ( 239 )...( 254 ): >HXBD_HUMAN
KFITKDKRRKISAATS

SEQ ID NO: 26516 - protein, 16 aa, Homo sapiens
  ( 240 )...( 255 ): >HXBD_HUMAN
FITKDKRRKISAATSL

SEQ ID NO: 26517 - protein, 16 aa, Homo sapiens
  ( 241 )...( 256 ): >HXBD_HUMAN
ITKDKRRKISAATSLS

SEQ ID NO: 26518 - protein, 16 aa, Homo sapiens
  ( 243 )...( 258 ): >HXBD_HUMAN
KDKRRKISAATSLSER

SEQ ID NO: 26519 - protein, 16 aa, Homo sapiens
  ( 244 )...( 259 ): >HXBD_HUMAN
DKRRKISAATSLSERQ

SEQ ID NO: 26520 - protein, 16 aa, Homo sapiens
  ( 245 )...( 260 ): >HXBD_HUMAN
KRRKISAATSLSERQI

SEQ ID NO: 26521 - protein, 16 aa, Homo sapiens
  ( 246 )...( 261 ): >HXBD_HUMAN
RRKISAATSLSERQIT

SEQ ID NO: 26522 - protein, 16 aa, Homo sapiens
  ( 267 )...( 282 ): >HXBD_HUMAN
RRVKEKKVLAKVKNSA

SEQ ID NO: 26523 - protein, 16 aa, Homo sapiens
  ( 268 )...( 283 ): >HXBD_HUMAN
RVKEKKVLAKVKNSAT

SEQ ID NO: 26524 - protein, 16 aa, Homo sapiens
  ( 269 )...( 284 ): >HXBD_HUMAN
VKEKKVLAKVKNSATP

SEQ ID NO: 26525 - protein, 15 aa, Homo sapiens
  ( 270 )...( 285 ): >HXBD_HUMAN
KEKKVLAKVKNSATP

SEQ ID NO: 26526 - protein, 16 aa, Homo sapiens
  ( 151 )...( 166 ): >HXC4_HUMAN
YNGGEPKRSRAAYTRQ

SEQ ID NO: 26527 - protein, 16 aa, Homo sapiens
  ( 152 )...( 167 ): >HXC4_HUMAN
NGGEPKRSRAAYTRQQ

SEQ ID NO: 26528 - protein, 16 aa, Homo sapiens
  ( 153 )...( 168 ): >HXC4_HUMAN
GGEPKRSRAAYTRQQV

SEQ ID NO: 26529 - protein, 16 aa, Homo sapiens
  ( 154 )...( 169 ): >HXC4_HUMAN
GEPKRSRAAYTRQQVL

SEQ ID NO: 26530 - protein, 16 aa, Homo sapiens
  ( 156 )...( 171 ): >HXC4_HUMAN
PKRSRAAYTRQQVLEL

SEQ ID NO: 26531 - protein, 16 aa, Homo sapiens
  ( 181 )...( 196 ): >HXC4_HUMAN
LTRRRRIEIAHSLCLS

SEQ ID NO: 26532 - protein, 16 aa, Homo sapiens
  ( 153 )...( 168 ): >HXC5_HUMAN
TDGKRSRTSYTRYQTL

SEQ ID NO: 26533 - protein, 16 aa, Homo sapiens
  ( 155 )...( 170 ): >HXC5_HUMAN
GKRSRTSYTRYQTLEL

SEQ ID NO: 26534 - protein, 16 aa, Homo sapiens
  ( 131 )...( 146 ): >HXC6_HUMAN
SHSGVGYGADRRRGRQ

SEQ ID NO: 26535 - protein, 16 aa, Homo sapiens
  ( 132 )...( 147 ): >HXC6_HUMAN
HSGVGYGADRRRGRQI

SEQ ID NO: 26536 - protein, 16 aa, Homo sapiens
  ( 133 )...( 148 ): >HXC6_HUMAN
SGVGYGADRRRGRQIY

SEQ ID NO: 26537 - protein, 16 aa, Homo sapiens
  ( 134 )...( 149 ): >HXC6_HUMAN
GVGYGADRRRGRQIYS

SEQ ID NO: 26538 - protein, 16 aa, Homo sapiens
  ( 135 )...( 150 ): >HXC6_HUMAN
VGYGADRRRGRQIYSR

SEQ ID NO: 26539 - protein, 16 aa, Homo sapiens
  ( 165 )...( 180 ): >HXC6_HUMAN
YLTRRRRIEIANALCL

SEQ ID NO: 26540 - protein, 16 aa, Homo sapiens
  ( 166 )...( 181 ): >HXC6_HUMAN
LTRRRRIEIANALCLT

SEQ ID NO: 26541 - protein, 16 aa, Homo sapiens
  ( 146 )...( 161 ): >HXC8_HUMAN
APGRRSGRQTYSRYQT

SEQ ID NO: 26542 - protein, 16 aa, Homo sapiens
  ( 172 )...( 187 ): >HXC8_HUMAN
PYLTRKRRIEVSHALG

SEQ ID NO: 26543 - protein, 16 aa, Homo sapiens
  ( 173 )...( 188 ): >HXC8_HUMAN
YLTRKRRIEVSHALGL

SEQ ID NO: 26544 - protein, 16 aa, Homo sapiens
  ( 174 )...( 189 ): >HXC8_HUMAN
LTRKRRIEVSHALGLT

SEQ ID NO: 26545 - protein, 16 aa, Homo sapiens
  ( 176 )...( 191 ): >HXC8_HUMAN
RKRRIEVSHALGLTER

SEQ ID NO: 26546 - protein, 16 aa, Homo sapiens
  ( 257 )...( 272 ): >HXCA_HUMAN
NTTGNWLTAKSGRKKR

SEQ ID NO: 26547 - protein, 16 aa, Homo sapiens
  ( 258 )...( 273 ): >HXCA_HUMAN
TTGNWLTAKSGRKKRC

SEQ ID NO: 26548 - protein, 16 aa, Homo sapiens
  ( 263 )...( 278 ): >HXCA_HUMAN
LTAKSGRKKRCPYTKH

SEQ ID NO: 26549 - protein, 16 aa, Homo sapiens
  ( 221 )...( 236 ): >HXCB_HUMAN
PAKGAAPNAPRTRKKR

SEQ ID NO: 26550 - protein, 16 aa, Homo sapiens
  ( 216 )...( 231 ): >HXCC_HUMAN
KKRKPYSKLQLAELEG

SEQ ID NO: 26551 - protein, 16 aa, Homo sapiens
  ( 247 )...( 262 ): >HXCD_HUMAN
VVPLQPEVSSYRRGRK

SEQ ID NO: 26552 - protein, 16 aa, Homo sapiens
  ( 260 )...( 275 ): >HXCD_HUMAN
GRKKRVPYTKVQLKEL

SEQ ID NO: 26553 - protein, 16 aa, Homo sapiens
  ( 280 )...( 295 ): >HXCD_HUMAN
AASKFITKEKRRRISA

SEQ ID NO: 26554 - protein, 16 aa, Homo sapiens
  ( 281 )...( 296 ): >HXCD_HUMAN
ASKFITKEKRRRISAT

SEQ ID NO: 26555 - protein, 16 aa, Homo sapiens
  ( 282 )...( 297 ): >HXCD_HUMAN
SKFITKEKRRRISATT

SEQ ID NO: 26556 - protein, 16 aa, Homo sapiens
  ( 284 )...( 299 ): >HXCD_HUMAN
FITKEKRRRISATTNL

SEQ ID NO: 26557 - protein, 16 aa, Homo sapiens
  ( 285 )...( 300 ): >HXCD_HUMAN
ITKEKRRRISATTNLS

SEQ ID NO: 26558 - protein, 16 aa, Homo sapiens
  ( 286 )...( 301 ): >HXCD_HUMAN
TKEKRRRISATTNLSE

SEQ ID NO: 26559 - protein, 16 aa, Homo sapiens
  ( 289 )...( 304 ): >HXCD_HUMAN
KRRRISATTNLSERQV

SEQ ID NO: 26560 - protein, 16 aa, Homo sapiens
  ( 290 )...( 305 ): >HXCD_HUMAN
RRRISATTNLSERQVT

SEQ ID NO: 26561 - protein, 16 aa, Homo sapiens
  ( 309 )...( 324 ): >HXCD_HUMAN
QNRRVKEKKVVSKSKA

SEQ ID NO: 26562 - protein, 16 aa, Homo sapiens
  ( 310 )...( 325 ): >HXCD_HUMAN
NRRVKEKKVVSKSKAP

SEQ ID NO: 26563 - protein, 16 aa, Homo sapiens
  ( 311 )...( 326 ): >HXCD_HUMAN
RRVKEKKVVSKSKAPH

SEQ ID NO: 26564 - protein, 16 aa, Homo sapiens
  ( 312 )...( 327 ): >HXCD_HUMAN
RVKEKKVVSKSKAPHL

SEQ ID NO: 26565 - protein, 16 aa, Homo sapiens
  ( 206 )...( 221 ): >HXD1_HUMAN
EWMKVKRNASKKGKLA

SEQ ID NO: 26566 - protein, 16 aa, Homo sapiens
  ( 207 )...( 222 ): >HXD1_HUMAN
WMKVKRNASKKGKLAE

SEQ ID NO: 26567 - protein, 16 aa, Homo sapiens
  ( 208 )...( 223 ): >HXD1_HUMAN
MKVKRNASKKGKLAEY

SEQ ID NO: 26568 - protein, 16 aa, Homo sapiens
  ( 209 )...( 224 ): >HXD1_HUMAN
KVKRNASKKGKLAEYG

SEQ ID NO: 26569 - protein, 16 aa, Homo sapiens
  ( 210 )...( 225 ): >HXD1_HUMAN
VKRNASKKGKLAEYGA

SEQ ID NO: 26570 - protein, 16 aa, Homo sapiens
  ( 211 )...( 226 ): >HXD1_HUMAN
KRNASKKGKLAEYGAA

SEQ ID NO: 26571 - protein, 16 aa, Homo sapiens
  ( 251 )...( 266 ): >HXD1_HUMAN
NKYLTRARRIEIANCL

SEQ ID NO: 26572 - protein, 16 aa, Homo sapiens
  ( 281 )...( 296 ): >HXD1_HUMAN
RMKQKKREREGLLATA

SEQ ID NO: 26573 - protein, 16 aa, Homo sapiens
  ( 282 )...( 297 ): >HXD1_HUMAN
MKQKKREREGLLATAI

SEQ ID NO: 26574 - protein, 16 aa, Homo sapiens
  ( 283 )...( 298 ): >HXD1_HUMAN
KQKKREREGLLATAIP

SEQ ID NO: 26575 - protein, 16 aa, Homo sapiens
  ( 175 )...( 190 ): >HXD3_HUMAN
GPASKRVRTAYTSAQL

SEQ ID NO: 26576 - protein, 16 aa, Homo sapiens
  ( 176 )...( 191 ): >HXD3_HUMAN
PASKRVRTAYTSAQLV

SEQ ID NO: 26577 - protein, 16 aa, Homo sapiens
  ( 231 )...( 246 ): >HXD3_HUMAN
MKYKKDQKAKGILHSP

SEQ ID NO: 26578 - protein, 16 aa, Homo sapiens
  ( 232 )...( 247 ): >HXD3_HUMAN
KYKKDQKAKGILHSPA

SEQ ID NO: 26579 - protein, 16 aa, Homo sapiens
  ( 125 )...( 140 ): >HXD4_HUMAN
TALKQPAVVYPWMKKV

SEQ ID NO: 26580 - protein, 16 aa, Homo sapiens
  ( 127 )...( 142 ): >HXD4_HUMAN
LKQPAVVYPWMKKVHV

SEQ ID NO: 26581 - protein, 16 aa, Homo sapiens
  ( 148 )...( 163 ): >HXD4_HUMAN
NYTGGEPKRSRTAYTR

SEQ ID NO: 26582 - protein, 16 aa, Homo sapiens
  ( 149 )...( 164 ): >HXD4_HUMAN
YTGGEPKRSRTAYTRQ

SEQ ID NO: 26583 - protein, 16 aa, Homo sapiens
  ( 150 )...( 165 ): >HXD4_HUMAN
TGGEPKRSRTAYTRQQ

SEQ ID NO: 26584 - protein, 16 aa, Homo sapiens
  ( 151 )...( 166 ): >HXD4_HUMAN
GGEPKRSRTAYTRQQV

SEQ ID NO: 26585 - protein, 16 aa, Homo sapiens
  ( 152 )...( 167 ): >HXD4_HUMAN
GEPKRSRTAYTRQQVL

SEQ ID NO: 26586 - protein, 16 aa, Homo sapiens
  ( 154 )...( 169 ): >HXD4_HUMAN
PKRSRTAYTRQQVLEL

SEQ ID NO: 26587 - protein, 16 aa, Homo sapiens
  ( 178 )...( 193 ): >HXD4_HUMAN
YLTRRRRIEIAHTLCL

SEQ ID NO: 26588 - protein, 16 aa, Homo sapiens
  ( 179 )...( 194 ): >HXD4_HUMAN
LTRRRRIEIAHTLCLS

SEQ ID NO: 26589 - protein, 16 aa, Homo sapiens
  ( 220 )...( 235 ): >HXD8_HUMAN
PYLTRKRRIEVSHALA

SEQ ID NO: 26590 - protein, 16 aa, Homo sapiens
  ( 221 )...( 236 ): >HXD8_HUMAN
YLTRKRRIEVSHALAL

SEQ ID NO: 26591 - protein, 16 aa, Homo sapiens
  ( 222 )...( 237 ): >HXD8_HUMAN
LTRKRRIEVSHALALT

SEQ ID NO: 26592 - protein, 16 aa, Homo sapiens
  ( 224 )...( 239 ): >HXD8_HUMAN
RKRRIEVSHALALTER

SEQ ID NO: 26593 - protein, 16 aa, Homo sapiens
  ( 148 )...( 163 ): >HXDA_HUMAN
VPRYFRLSQTYATGKT

SEQ ID NO: 26594 - protein, 16 aa, Homo sapiens
  ( 149 )...( 164 ): >HXDA_HUMAN
PRYFRLSQTYATGKTQ

SEQ ID NO: 26595 - protein, 16 aa, Homo sapiens
  ( 255 )...( 270 ): >HXDA_HUMAN
TPTSNWLTAKSGRKKR

SEQ ID NO: 26596 - protein, 16 aa, Homo sapiens
  ( 261 )...( 276 ): >HXDA_HUMAN
LTAKSGRKKRCPYTKH

SEQ ID NO: 26597 - protein, 16 aa, Homo sapiens
  ( 254 )...( 269 ): >HXDB_HUMAN
AEKSSSAVAPQRSRKK

SEQ ID NO: 26598 - protein, 16 aa, Homo sapiens
  ( 255 )...( 270 ): >HXDB_HUMAN
EKSSSAVAPQRSRKKR

SEQ ID NO: 26599 - protein, 16 aa, Homo sapiens
  ( 256 )...( 271 ): >HXDB_HUMAN
KSSSAVAPQRSRKKRC

SEQ ID NO: 26600 - protein, 16 aa, Homo sapiens
  ( 197 )...( 212 ): >HXDC_HUMAN
RPAVGGGPGEARKKRK

SEQ ID NO: 26601 - protein, 16 aa, Homo sapiens
  ( 199 )...( 214 ): >HXDC_HUMAN
AVGGGPGEARKKRKPY

SEQ ID NO: 26602 - protein, 16 aa, Homo sapiens
  ( 200 )...( 215 ): >HXDC_HUMAN
VGGGPGEARKKRKPYT

SEQ ID NO: 26603 - protein, 16 aa, Homo sapiens
  ( 201 )...( 216 ): >HXDC_HUMAN
GGGPGEARKKRKPYTK

SEQ ID NO: 26604 - protein, 16 aa, Homo sapiens
  ( 202 )...( 217 ): >HXDC_HUMAN
GGPGEARKKRKPYTKQ

SEQ ID NO: 26605 - protein, 16 aa, Homo sapiens
  ( 205 )...( 220 ): >HXDC_HUMAN
GEARKKRKPYTKQQIA

SEQ ID NO: 26606 - protein, 16 aa, Homo sapiens
  ( 259 )...( 274 ): >HXDC_HUMAN
RMKKKRVVLREQALAL

SEQ ID NO: 26607 - protein, 16 aa, Homo sapiens
  ( 260 )...( 275 ): >HXDC_HUMAN
MKKKRVVLREQALALY

SEQ ID NO: 26608 - protein, 15 aa, Homo sapiens
  ( 261 )...( 276 ): >HXDC_HUMAN
KKKRVVLREQALALY

SEQ ID NO: 26609 - protein, 14 aa, Homo sapiens
  ( 262 )...( 277 ): >HXDC_HUMAN
KKRVVLREQALALY

SEQ ID NO: 26610 - protein, 16 aa, Homo sapiens
  ( 268 )...( 283 ): >HXDD_HUMAN
GRKKRVPYTKLQLKEL

SEQ ID NO: 26611 - protein, 16 aa, Homo sapiens
  ( 293 )...( 308 ): >HXDD_HUMAN
INKDKRRRISAATNLS

SEQ ID NO: 26612 - protein, 16 aa, Homo sapiens
  ( 297 )...( 312 ): >HXDD_HUMAN
KRRRISAATNLSERQV

SEQ ID NO: 26613 - protein, 16 aa, Homo sapiens
  ( 298 )...( 313 ): >HXDD_HUMAN
RRRISAATNLSERQVT

SEQ ID NO: 26614 - protein, 16 aa, Homo sapiens
  ( 319 )...( 334 ): >HXDD_HUMAN
RRVKDKKIVSKLKDTV

SEQ ID NO: 26615 - protein, 16 aa, Homo sapiens
  ( 320 )...( 335 ): >HXDD_HUMAN
RVKDKKIVSKLKDTVS

SEQ ID NO: 26616 - protein, 16 aa, Homo sapiens
  ( 74 )...( 89 ): >ID1_HUMAN
SRLKELVPTLPQNRKV

SEQ ID NO: 26617 - protein, 16 aa, Homo sapiens
  ( 75 )...( 90 ): >ID1_HUMAN
RLKELVPTLPQNRKVS

SEQ ID NO: 26618 - protein, 16 aa, Homo sapiens
  ( 76 )...( 91 ): >ID1_HUMAN
LKELVPTLPQNRKVSK

SEQ ID NO: 26619 - protein, 16 aa, Homo sapiens
  ( 77 )...( 92 ): >ID1_HUMAN
KELVPTLPQNRKVSKV

SEQ ID NO: 26620 - protein, 16 aa, Homo sapiens
  ( 17 )...( 32 ): >ID3_HUMAN
LSERSLAIARGRGKGP

SEQ ID NO: 26621 - protein, 16 aa, Homo sapiens
  ( 73 )...( 88 ): >ID4_HUMAN
SRLRRLVPTIPPNKKV

SEQ ID NO: 26622 - protein, 16 aa, Homo sapiens
  ( 74 )...( 89 ): >ID4_HUMAN
RLRRLVPTIPPNKKVS

SEQ ID NO: 26623 - protein, 16 aa, Homo sapiens
  ( 75 )...( 90 ): >ID4_HUMAN
LRRLVPTIPPNKKVSK

SEQ ID NO: 26624 - protein, 16 aa, Homo sapiens
  ( 76 )...( 91 ): >ID4_HUMAN
RRLVPTIPPNKKVSKV

SEQ ID NO: 26625 - protein, 16 aa, Homo sapiens
  ( 77 )...( 92 ): >ID4_HUMAN
RLVPTIPPNKKVSKVE

SEQ ID NO: 26626 - protein, 16 aa, Homo sapiens
  ( 130 )...( 145 ): >IN35_HUMAN
LSGRRVLVTGFPASLR

SEQ ID NO: 26627 - protein, 16 aa, Homo sapiens
  ( 131 )...( 146 ): >IN35_HUMAN
SGRRVLVTGFPASLRL

SEQ ID NO: 26628 - protein, 16 aa, Homo sapiens
  ( 132 )...( 147 ): >IN35_HUMAN
GRRVLVTGFPASLRLS

SEQ ID NO: 26629 - protein, 16 aa, Homo sapiens
  ( 99 )...( 114 ): >ITF2_HUMAN
RIQSKTERGSYSSYGR

SEQ ID NO: 26630 - protein, 16 aa, Homo sapiens
  ( 164 )...( 179 ): >ITF2_HUMAN
SAMEVQTKKVRKVPPG

SEQ ID NO: 26631 - protein, 16 aa, Homo sapiens
  ( 165 )...( 180 ): >ITF2_HUMAN
AMEVQTKKVRKVPPGL

SEQ ID NO: 26632 - protein, 16 aa, Homo sapiens
  ( 166 )...( 181 ): >ITF2_HUMAN
MEVQTKKVRKVPPGLP

SEQ ID NO: 26633 - protein, 16 aa, Homo sapiens
  ( 167 )...( 182 ): >ITF2_HUMAN
EVQTKKVRKVPPGLPS

SEQ ID NO: 26634 - protein, 16 aa, Homo sapiens
  ( 168 )...( 183 ): >ITF2_HUMAN
VQTKKVRKVPPGLPSS

SEQ ID NO: 26635 - protein, 16 aa, Homo sapiens
  ( 169 )...( 184 ): >ITF2_HUMAN
QTKKVRKVPPGLPSSV

SEQ ID NO: 26636 - protein, 16 aa, Homo sapiens
  ( 170 )...( 185 ): >ITF2_HUMAN
TKKVRKVPPGLPSSVY

SEQ ID NO: 26637 - protein, 16 aa, Homo sapiens
  ( 619 )...( 634 ): >ITF2_HUMAN
QQVRERNLNPKAACLK

SEQ ID NO: 26638 - protein, 16 aa, Homo sapiens
  ( 279 )...( 294 ): >JUNB_HUMAN
RLAATKCRKRKLERIA

SEQ ID NO: 26639 - protein, 16 aa, Homo sapiens
  ( 280 )...( 295 ): >JUNB_HUMAN
LAATKCRKRKLERIAR

SEQ ID NO: 26640 - protein, 16 aa, Homo sapiens
  ( 281 )...( 296 ): >JUNB_HUMAN
AATKCRKRKLERIARL

SEQ ID NO: 26641 - protein, 16 aa, Homo sapiens
  ( 288 )...( 303 ): >JUNB_HUMAN
RKLERIARLEDKVKTL

SEQ ID NO: 26642 - protein, 16 aa, Homo sapiens
  ( 289 )...( 304 ): >JUNB_HUMAN
KLERIARLEDKVKTLK

SEQ ID NO: 26643 - protein, 16 aa, Homo sapiens
  ( 143 )...( 158 ): >KLF5_HUMAN
ITHLRTGLYKSQRPCV

SEQ ID NO: 26644 - protein, 16 aa, Homo sapiens
  ( 146 )...( 161 ): >KLF5_HUMAN
LRTGLYKSQRPCVTHI

SEQ ID NO: 26645 - protein, 16 aa, Homo sapiens
  ( 147 )...( 162 ): >KLF5_HUMAN
RTGLYKSQRPCVTHIK

SEQ ID NO: 26646 - protein, 16 aa, Homo sapiens
  ( 63 )...( 78 ): >KR18_HUMAN
GKEPWTVKSCVKIARK

SEQ ID NO: 26647 - protein, 16 aa, Homo sapiens
  ( 64 )...( 79 ): >KR18_HUMAN
KEPWTVKSCVKIARKP

SEQ ID NO: 26648 - protein, 16 aa, Homo sapiens
  ( 65 )...( 80 ): >KR18_HUMAN
EPWTVKSCVKIARKPR

SEQ ID NO: 26649 - protein, 16 aa, Homo sapiens
  ( 66 )...( 81 ): >KR18_HUMAN
PWTVKSCVKIARKPRT

SEQ ID NO: 26650 - protein, 16 aa, Homo sapiens
  ( 67 )...( 82 ): >KR18_HUMAN
WTVKSCVKIARKPRTR

SEQ ID NO: 26651 - protein, 16 aa, Homo sapiens
  ( 68 )...( 83 ): >KR18_HUMAN
TVKSCVKIARKPRTRE

SEQ ID NO: 26652 - protein, 16 aa, Homo sapiens
  ( 69 )...( 84 ): >KR18_HUMAN
VKSCVKIARKPRTREC

SEQ ID NO: 26653 - protein, 16 aa, Homo sapiens
  ( 70 )...( 85 ): >KR18_HUMAN
KSCVKIARKPRTRECV

SEQ ID NO: 26654 - protein, 16 aa, Homo sapiens
  ( 71 )...( 86 ): >KR18_HUMAN
SCVKIARKPRTRECVK

SEQ ID NO: 26655 - protein, 16 aa, Homo sapiens
  ( 72 )...( 87 ): >KR18_HUMAN
CVKIARKPRTRECVKG

SEQ ID NO: 26656 - protein, 16 aa, Homo sapiens
  ( 73 )...( 88 ): >KR18_HUMAN
VKIARKPRTRECVKGV

SEQ ID NO: 26657 - protein, 16 aa, Homo sapiens
  ( 74 )...( 89 ): >KR18_HUMAN
KIARKPRTRECVKGVV

SEQ ID NO: 26658 - protein, 16 aa, Homo sapiens
  ( 75 )...( 90 ): >KR18_HUMAN
IARKPRTRECVKGVVT

SEQ ID NO: 26659 - protein, 16 aa, Homo sapiens
  ( 76 )...( 91 ): >KR18_HUMAN
ARKPRTRECVKGVVTD

SEQ ID NO: 26660 - protein, 16 aa, Homo sapiens
  ( 77 )...( 92 ): >KR18_HUMAN
RKPRTRECVKGVVTDI

SEQ ID NO: 26661 - protein, 16 aa, Homo sapiens
  ( 149 )...( 164 ): >KR18_HUMAN
TGNYKGVLMAQKEGKR

SEQ ID NO: 26662 - protein, 16 aa, Homo sapiens
  ( 152 )...( 167 ): >KR18_HUMAN
YKGVLMAQKEGKRDQR

SEQ ID NO: 26663 - protein, 16 aa, Homo sapiens
  ( 243 )...( 258 ): >KR18_HUMAN
LLTQRRKANSCGKPYK

SEQ ID NO: 26664 - protein, 16 aa, Homo sapiens
  ( 543 )...( 558 ): >KR18_HUMAN
GKSFTQKSHLRSHRGI

SEQ ID NO: 26665 - protein, 16 aa, Homo sapiens
  ( 571 )...( 586 ): >KR18_HUMAN
GKVFAQTSQLARHWRV

SEQ ID NO: 26666 - protein, 16 aa, Homo sapiens
  ( 739 )...( 754 ): >KR18_HUMAN
GKVFTQNAHLANHRRI

SEQ ID NO: 26667 - protein, 16 aa, Homo sapiens
  ( 327 )...( 342 ): >LEF1_HUMAN
AAINQILGRRWHALSR

SEQ ID NO: 26668 - protein, 16 aa, Homo sapiens
  ( 375 )...( 390 ): >LEF1_HUMAN
KKKRKREKLQESASGT

SEQ ID NO: 26669 - protein, 16 aa, Homo sapiens
  ( 376 )...( 391 ): >LEF1_HUMAN
KKRKREKLQESASGTG

SEQ ID NO: 26670 - protein, 16 aa, Homo sapiens
  ( 377 )...( 392 ): >LEF1_HUMAN
KRKREKLQESASGTGP

SEQ ID NO: 26671 - protein, 16 aa, Homo sapiens
  ( 378 )...( 393 ): >LEF1_HUMAN
RKREKLQESASGTGPR

SEQ ID NO: 26672 - protein, 16 aa, Homo sapiens
  ( 172 )...( 187 ): >LYL1_HUMAN
KLSKNEVLRLAMKYIG

SEQ ID NO: 26673 - protein, 16 aa, Homo sapiens
  ( 180 )...( 195 ): >LYL1_HUMAN
RLAMKYIGFLVRLLRD

SEQ ID NO: 26674 - protein, 16 aa, Homo sapiens
  ( 211 )...( 226 ): >LYL1_HUMAN
KRPVHRVPDDGARRGS

SEQ ID NO: 26675 - protein, 16 aa, Homo sapiens
  ( 214 )...( 229 ): >LYL1_HUMAN
VHRVPDDGARRGSGRR

SEQ ID NO: 26676 - protein, 16 aa, Homo sapiens
  ( 223 )...( 238 ): >LYL1_HUMAN
RRGSGRRAEAAARSQP

SEQ ID NO: 26677 - protein, 16 aa, Homo sapiens
  ( 35 )...( 50 ): >MAD4_HUMAN
GDFAREKTKAAGLVRK

SEQ ID NO: 26678 - protein, 16 aa, Homo sapiens
  ( 36 )...( 51 ): >MAD4_HUMAN
DFAREKTKAAGLVRKA

SEQ ID NO: 26679 - protein, 16 aa, Homo sapiens
  ( 37 )...( 52 ): >MAD4_HUMAN
FAREKTKAAGLVRKAP

SEQ ID NO: 26680 - protein, 16 aa, Homo sapiens
  ( 38 )...( 53 ): >MAD4_HUMAN
AREKTKAAGLVRKAPN

SEQ ID NO: 26681 - protein, 16 aa, Homo sapiens
  ( 39 )...( 54 ): >MAD4_HUMAN
REKTKAAGLVRKAPNN

SEQ ID NO: 26682 - protein, 16 aa, Homo sapiens
  ( 40 )...( 55 ): >MAD4_HUMAN
EKTKAAGLVRKAPNNR

SEQ ID NO: 26683 - protein, 16 aa, Homo sapiens
  ( 41 )...( 56 ): >MAD4_HUMAN
KTKAAGLVRKAPNNRS

SEQ ID NO: 26684 - protein, 16 aa, Homo sapiens
  ( 66 )...( 81 ): >MAD4_HUMAN
RAKLRLYLEQLKQLVP

SEQ ID NO: 26685 - protein, 16 aa, Homo sapiens
  ( 87 )...( 102 ): >MAD4_HUMAN
TRHTTLSLLKRAKVHI

SEQ ID NO: 26686 - protein, 16 aa, Homo sapiens
  ( 88 )...( 103 ): >MAD4_HUMAN
RHTTLSLLKRAKVHIK

SEQ ID NO: 26687 - protein, 16 aa, Homo sapiens
  ( 89 )...( 104 ): >MAD4_HUMAN
HTTLSLLKRAKVHIKK

SEQ ID NO: 26688 - protein, 16 aa, Homo sapiens
  ( 90 )...( 105 ): >MAD4_HUMAN
TTLSLLKRAKVHIKKL

SEQ ID NO: 26689 - protein, 16 aa, Homo sapiens
  ( 91 )...( 106 ): >MAD4_HUMAN
TLSLLKRAKVHIKKLE

SEQ ID NO: 26690 - protein, 16 aa, Homo sapiens
  ( 127 )...( 142 ): >MAD4_HUMAN
KRRLEQLSVQSVERVR

SEQ ID NO: 26691 - protein, 16 aa, Homo sapiens
  ( 67 )...( 82 ): >MAD_HUMAN
NRRAHLRLCLEKLKGL

SEQ ID NO: 26692 - protein, 16 aa, Homo sapiens
  ( 68 )...( 83 ): >MAD_HUMAN
RRAHLRLCLEKLKGLV

SEQ ID NO: 26693 - protein, 16 aa, Homo sapiens
  ( 69 )...( 84 ): >MAD_HUMAN
RAHLRLCLEKLKGLVP

SEQ ID NO: 26694 - protein, 16 aa, Homo sapiens
  ( 1 )...( 16 ): >MAFG_HUMAN
MTTPNKGNKALKVKRE

SEQ ID NO: 26695 - protein, 16 aa, Homo sapiens
  ( 2 )...( 17 ): >MAFG_HUMAN
TTPNKGNKALKVKREP

SEQ ID NO: 26696 - protein, 16 aa, Homo sapiens
  ( 3 )...( 18 ): >MAFG_HUMAN
TPNKGNKALKVKREPG

SEQ ID NO: 26697 - protein, 16 aa, Homo sapiens
  ( 4 )...( 19 ): >MAFG_HUMAN
PNKGNKALKVKREPGE

SEQ ID NO: 26698 - protein, 16 aa, Homo sapiens
  ( 5 )...( 20 ): >MAFG_HUMAN
NKGNKALKVKREPGEN

SEQ ID NO: 26699 - protein, 16 aa, Homo sapiens
  ( 6 )...( 21 ): >MAFG_HUMAN
KGNKALKVKREPGENG

SEQ ID NO: 26700 - protein, 16 aa, Homo sapiens
  ( 41 )...( 56 ): >MAFG_HUMAN
LRGLSKEEIVQLKQRR

SEQ ID NO: 26701 - protein, 16 aa, Homo sapiens
  ( 43 )...( 58 ): >MAFG_HUMAN
GLSKEEIVQLKQRRRT

SEQ ID NO: 26702 - protein, 16 aa, Homo sapiens
  ( 44 )...( 59 ): >MAFG_HUMAN
LSKEEIVQLKQRRRTL

SEQ ID NO: 26703 - protein, 16 aa, Homo sapiens
  ( 56 )...( 71 ): >MAFG_HUMAN
RRTLKNRGYAASCRVK

SEQ ID NO: 26704 - protein, 16 aa, Homo sapiens
  ( 57 )...( 72 ): >MAFG_HUMAN
RTLKNRGYAASCRVKR

SEQ ID NO: 26705 - protein, 16 aa, Homo sapiens
  ( 58 )...( 73 ): >MAFG_HUMAN
TLKNRGYAASCRVKRV

SEQ ID NO: 26706 - protein, 16 aa, Homo sapiens
  ( 59 )...( 74 ): >MAFG_HUMAN
LKNRGYAASCRVKRVT

SEQ ID NO: 26707 - protein, 16 aa, Homo sapiens
  ( 60 )...( 75 ): >MAFG_HUMAN
KNRGYAASCRVKRVTQ

SEQ ID NO: 26708 - protein, 16 aa, Homo sapiens
  ( 61 )...( 76 ): >MAFG_HUMAN
NRGYAASCRVKRVTQK

SEQ ID NO: 26709 - protein, 16 aa, Homo sapiens
  ( 62 )...( 77 ): >MAFG_HUMAN
RGYAASCRVKRVTQKE

SEQ ID NO: 26710 - protein, 16 aa, Homo sapiens
  ( 68 )...( 83 ): >MAFG_HUMAN
CRVKRVTQKEELEKQK

SEQ ID NO: 26711 - protein, 16 aa, Homo sapiens
  ( 69 )...( 84 ): >MAFG_HUMAN
RVKRVTQKEELEKQKA

SEQ ID NO: 26712 - protein, 16 aa, Homo sapiens
  ( 108 )...( 123 ): >MAFG_HUMAN
RSKYEALQTFARTVAR

SEQ ID NO: 26713 - protein, 16 aa, Homo sapiens
  ( 115 )...( 130 ): >MAFG_HUMAN
QTFARTVARSPVAPAR

SEQ ID NO: 26714 - protein, 16 aa, Homo sapiens
  ( 1 )...( 16 ): >MAFK_HUMAN
MTTNPKPNKALKVKKE

SEQ ID NO: 26715 - protein, 16 aa, Homo sapiens
  ( 2 )...( 17 ): >MAFK_HUMAN
TTNPKPNKALKVKKEA

SEQ ID NO: 26716 - protein, 16 aa, Homo sapiens
  ( 3 )...( 18 ): >MAFK_HUMAN
TNPKPNKALKVKKEAG

SEQ ID NO: 26717 - protein, 16 aa, Homo sapiens
  ( 40 )...( 55 ): >MAFK_HUMAN
HLRGLTKEEVTRLKQR

SEQ ID NO: 26718 - protein, 16 aa, Homo sapiens
  ( 41 )...( 56 ): >MAFK_HUMAN
LRGLTKEEVTRLKQRR

SEQ ID NO: 26719 - protein, 16 aa, Homo sapiens
  ( 43 )...( 58 ): >MAFK_HUMAN
GLTKEEVTRLKQRRRT

SEQ ID NO: 26720 - protein, 16 aa, Homo sapiens
  ( 56 )...( 71 ): >MAFK_HUMAN
RRTLKNRGYAASCRIK

SEQ ID NO: 26721 - protein, 16 aa, Homo sapiens
  ( 57 )...( 72 ): >MAFK_HUMAN
RTLKNRGYAASCRIKR

SEQ ID NO: 26722 - protein, 16 aa, Homo sapiens
  ( 58 )...( 73 ): >MAFK_HUMAN
TLKNRGYAASCRIKRV

SEQ ID NO: 26723 - protein, 16 aa, Homo sapiens
  ( 59 )...( 74 ): >MAFK_HUMAN
LKNRGYAASCRIKRVT

SEQ ID NO: 26724 - protein, 16 aa, Homo sapiens
  ( 60 )...( 75 ): >MAFK_HUMAN
KNRGYAASCRIKRVTQ

SEQ ID NO: 26725 - protein, 16 aa, Homo sapiens
  ( 61 )...( 76 ): >MAFK_HUMAN
NRGYAASCRIKRVTQK

SEQ ID NO: 26726 - protein, 16 aa, Homo sapiens
  ( 62 )...( 77 ): >MAFK_HUMAN
RGYAASCRIKRVTQKE

SEQ ID NO: 26727 - protein, 16 aa, Homo sapiens
  ( 108 )...( 123 ): >MAFK_HUMAN
RSKYEALQTFARTVAR

SEQ ID NO: 26728 - protein, 16 aa, Homo sapiens
  ( 8 )...( 23 ): >MAT1_HUMAN
RCKTTKYRNPSLKLMV

SEQ ID NO: 26729 - protein, 16 aa, Homo sapiens
  ( 10 )...( 25 ): >MAT1_HUMAN
KTTKYRNPSLKLMVNV

SEQ ID NO: 26730 - protein, 16 aa, Homo sapiens
  ( 204 )...( 219 ): >MAZ_HUMAN
NLRRHEAIHTGAKAGR

SEQ ID NO: 26731 - protein, 16 aa, Homo sapiens
  ( 205 )...( 220 ): >MAZ_HUMAN
LRRHEAIHTGAKAGRV

SEQ ID NO: 26732 - protein, 16 aa, Homo sapiens
  ( 206 )...( 221 ): >MAZ_HUMAN
RRHEAIHTGAKAGRVP

SEQ ID NO: 26733 - protein, 16 aa, Homo sapiens
  ( 264 )...( 279 ): >MAZ_HUMAN
GVVTTTASGKRIRKNH

SEQ ID NO: 26734 - protein, 16 aa, Homo sapiens
  ( 265 )...( 280 ): >MAZ_HUMAN
VVTTTASGKRIRKNHA

SEQ ID NO: 26735 - protein, 16 aa, Homo sapiens
  ( 266 )...( 281 ): >MAZ_HUMAN
VTTTASGKRIRKNHAC

SEQ ID NO: 26736 - protein, 16 aa, Homo sapiens
  ( 373 )...( 388 ): >MAZ_HUMAN
AAFATKDRLRAHTVRH

SEQ ID NO: 26737 - protein, 16 aa, Homo sapiens
  ( 17 )...( 32 ): >MEFA_HUMAN
RQVTFTKRKFGLMKKA

SEQ ID NO: 26738 - protein, 16 aa, Homo sapiens
  ( 18 )...( 33 ): >MEFA_HUMAN
QVTFTKRKFGLMKKAY

SEQ ID NO: 26739 - protein, 16 aa, Homo sapiens
  ( 19 )...( 34 ): >MEFA_HUMAN
VTFTKRKFGLMKKAYE

SEQ ID NO: 26740 - protein, 16 aa, Homo sapiens
  ( 20 )...( 35 ): >MEFA_HUMAN
TFTKRKFGLMKKAYEL

SEQ ID NO: 26741 - protein, 16 aa, Homo sapiens
  ( 22 )...( 37 ): >MEFA_HUMAN
TKRKFGLMKKAYELSV

SEQ ID NO: 26742 - protein, 16 aa, Homo sapiens
  ( 23 )...( 38 ): >MEFA_HUMAN
KRKFGLMKKAYELSVL

SEQ ID NO: 26743 - protein, 16 aa, Homo sapiens
  ( 24 )...( 39 ): >MEFA_HUMAN
RKFGLMKKAYELSVLC

SEQ ID NO: 26744 - protein, 16 aa, Homo sapiens
  ( 17 )...( 32 ): >MEFB_HUMAN
RQVTFTKRKFGLMKKA

SEQ ID NO: 26745 - protein, 16 aa, Homo sapiens
  ( 18 )...( 33 ): >MEFB_HUMAN
QVTFTKRKFGLMKKAY

SEQ ID NO: 26746 - protein, 16 aa, Homo sapiens
  ( 19 )...( 34 ): >MEFB_HUMAN
VTFTKRKFGLMKKAYE

SEQ ID NO: 26747 - protein, 16 aa, Homo sapiens
  ( 20 )...( 35 ): >MEFB_HUMAN
TFTKRKFGLMKKAYEL

SEQ ID NO: 26748 - protein, 16 aa, Homo sapiens
  ( 22 )...( 37 ): >MEFB_HUMAN
TKRKFGLMKKAYELSV

SEQ ID NO: 26749 - protein, 16 aa, Homo sapiens
  ( 23 )...( 38 ): >MEFB_HUMAN
KRKFGLMKKAYELSVL

SEQ ID NO: 26750 - protein, 16 aa, Homo sapiens
  ( 24 )...( 39 ): >MEFB_HUMAN
RKFGLMKKAYELSVLC

SEQ ID NO: 26751 - protein, 16 aa, Homo sapiens
  ( 17 )...( 32 ): >MEFC_HUMAN
RQVTFTKRKFGLMKKA

SEQ ID NO: 26752 - protein, 16 aa, Homo sapiens
  ( 18 )...( 33 ): >MEFC_HUMAN
QVTFTKRKFGLMKKAY

SEQ ID NO: 26753 - protein, 16 aa, Homo sapiens
  ( 19 )...( 34 ): >MEFC_HUMAN
VTFTKRKFGLMKKAYE

SEQ ID NO: 26754 - protein, 16 aa, Homo sapiens
  ( 20 )...( 35 ): >MEFC_HUMAN
TFTKRKFGLMKKAYEL

SEQ ID NO: 26755 - protein, 16 aa, Homo sapiens
  ( 22 )...( 37 ): >MEFC_HUMAN
TKRKFGLMKKAYELSV

SEQ ID NO: 26756 - protein, 16 aa, Homo sapiens
  ( 23 )...( 38 ): >MEFC_HUMAN
KRKFGLMKKAYELSVL

SEQ ID NO: 26757 - protein, 16 aa, Homo sapiens
  ( 24 )...( 39 ): >MEFC_HUMAN
RKFGLMKKAYELSVLC

SEQ ID NO: 26758 - protein, 16 aa, Homo sapiens
  ( 251 )...( 266 ): >MEFC_HUMAN
RKPDLRVLIPPGSKNT

SEQ ID NO: 26759 - protein, 16 aa, Homo sapiens
  ( 17 )...( 32 ): >MEFD_HUMAN
RQVTFTKRKFGLMKKA

SEQ ID NO: 26760 - protein, 16 aa, Homo sapiens
  ( 18 )...( 33 ): >MEFD_HUMAN
QVTFTKRKFGLMKKAY

SEQ ID NO: 26761 - protein, 16 aa, Homo sapiens
  ( 19 )...( 34 ): >MEFD_HUMAN
VTFTKRKFGLMKKAYE

SEQ ID NO: 26762 - protein, 16 aa, Homo sapiens
  ( 20 )...( 35 ): >MEFD_HUMAN
TFTKRKFGLMKKAYEL

SEQ ID NO: 26763 - protein, 16 aa, Homo sapiens
  ( 22 )...( 37 ): >MEFD_HUMAN
TKRKFGLMKKAYELSV

SEQ ID NO: 26764 - protein, 16 aa, Homo sapiens
  ( 23 )...( 38 ): >MEFD_HUMAN
KRKFGLMKKAYELSVL

SEQ ID NO: 26765 - protein, 16 aa, Homo sapiens
  ( 24 )...( 39 ): >MEFD_HUMAN
RKFGLMKKAYELSVLC

SEQ ID NO: 26766 - protein, 16 aa, Homo sapiens
  ( 264 )...( 279 ): >MEFD_HUMAN
PSRKPDLRVITSQAGK

SEQ ID NO: 26767 - protein, 16 aa, Homo sapiens
  ( 265 )...( 280 ): >MEFD_HUMAN
SRKPDLRVITSQAGKG

SEQ ID NO: 26768 - protein, 16 aa, Homo sapiens
  ( 266 )...( 281 ): >MEFD_HUMAN
RKPDLRVITSQAGKGL

SEQ ID NO: 26769 - protein, 15 aa, Homo sapiens
  ( 507 )...( 522 ): >MEFD_HUMAN
GSAVKRMRLDTWTLK

SEQ ID NO: 26770 - protein, 14 aa, Homo sapiens
  ( 508 )...( 523 ): >MEFD_HUMAN
SAVKRMRLDTWTLK

SEQ ID NO: 26771 - protein, 13 aa, Homo sapiens
  ( 509 )...( 524 ): >MEFD_HUMAN
AVKRMRLDTWTLK

SEQ ID NO: 26772 - protein, 16 aa, Homo sapiens
  ( 50 )...( 65 ): >MITF_HUMAN
SSSMTSRILLRQQLMR

SEQ ID NO: 26773 - protein, 16 aa, Homo sapiens
  ( 135 )...( 150 ): >MITF_HUMAN
QRQQVKQYLSTTLANK

SEQ ID NO: 26774 - protein, 16 aa, Homo sapiens
  ( 347 )...( 362 ): >MITF_HUMAN
RWNKGTILKASVDYIR

SEQ ID NO: 26775 - protein, 16 aa, Homo sapiens
  ( 348 )...( 363 ): >MITF_HUMAN
WNKGTILKASVDYIRK

SEQ ID NO: 26776 - protein, 16 aa, Homo sapiens
  ( 349 )...( 364 ): >MITF_HUMAN
NKGTILKASVDYIRKL

SEQ ID NO: 26777 - protein, 16 aa, Homo sapiens
  ( 350 )...( 365 ): >MITF_HUMAN
KGTILKASVDYIRKLQ

SEQ ID NO: 26778 - protein, 16 aa, Homo sapiens
  ( 351 )...( 366 ): >MITF_HUMAN
GTILKASVDYIRKLQR

SEQ ID NO: 26779 - protein, 16 aa, Homo sapiens
  ( 18 )...( 33 ): >MK08_HUMAN
STFTVLKRYQNLKPIG

SEQ ID NO: 26780 - protein, 16 aa, Homo sapiens
  ( 19 )...( 34 ): >MK08_HUMAN
TFTVLKRYQNLKPIGS

SEQ ID NO: 26781 - protein, 16 aa, Homo sapiens
  ( 20 )...( 35 ): >MK08_HUMAN
FTVLKRYQNLKPIGSG

SEQ ID NO: 26782 - protein, 16 aa, Homo sapiens
  ( 21 )...( 36 ): >MK08_HUMAN
TVLKRYQNLKPIGSGA

SEQ ID NO: 26783 - protein, 16 aa, Homo sapiens
  ( 22 )...( 37 ): >MK08_HUMAN
VLKRYQNLKPIGSGAQ

SEQ ID NO: 26784 - protein, 16 aa, Homo sapiens
  ( 23 )...( 38 ): >MK08_HUMAN
LKRYQNLKPIGSGAQG

SEQ ID NO: 26785 - protein, 16 aa, Homo sapiens
  ( 24 )...( 39 ): >MK08_HUMAN
KRYQNLKPIGSGAQGI

SEQ ID NO: 26786 - protein, 16 aa, Homo sapiens
  ( 46 )...( 61 ): >MK08_HUMAN
AILERNVAIKKLSRPF

SEQ ID NO: 26787 - protein, 16 aa, Homo sapiens
  ( 47 )...( 62 ): >MK08_HUMAN
ILERNVAIKKLSRPFQ

SEQ ID NO: 26788 - protein, 16 aa, Homo sapiens
  ( 64 )...( 79 ): >MK08_HUMAN
QTHAKRAYRELVLMKC

SEQ ID NO: 26789 - protein, 16 aa, Homo sapiens
  ( 65 )...( 80 ): >MK08_HUMAN
THAKRAYRELVLMKCV

SEQ ID NO: 26790 - protein, 16 aa, Homo sapiens
  ( 66 )...( 81 ): >MK08_HUMAN
HAKRAYRELVLMKCVN

SEQ ID NO: 26791 - protein, 16 aa, Homo sapiens
  ( 67 )...( 82 ): >MK08_HUMAN
AKRAYRELVLMKCVNH

SEQ ID NO: 26792 - protein, 16 aa, Homo sapiens
  ( 287 )...( 302 ): >MK08_HUMAN
NKLKASQARDLLSKML

SEQ ID NO: 26793 - protein, 16 aa, Homo sapiens
  ( 288 )...( 303 ): >MK08_HUMAN
KLKASQARDLLSKMLV

SEQ ID NO: 26794 - protein, 16 aa, Homo sapiens
  ( 18 )...( 33 ): >MK09_HUMAN
STFTVLKRYQQLKPIG

SEQ ID NO: 26795 - protein, 16 aa, Homo sapiens
  ( 19 )...( 34 ): >MK09_HUMAN
TFTVLKRYQQLKPIGS

SEQ ID NO: 26796 - protein, 16 aa, Homo sapiens
  ( 20 )...( 35 ): >MK09_HUMAN
FTVLKRYQQLKPIGSG

SEQ ID NO: 26797 - protein, 16 aa, Homo sapiens
  ( 21 )...( 36 ): >MK09_HUMAN
TVLKRYQQLKPIGSGA

SEQ ID NO: 26798 - protein, 16 aa, Homo sapiens
  ( 22 )...( 37 ): >MK09_HUMAN
VLKRYQQLKPIGSGAQ

SEQ ID NO: 26799 - protein, 16 aa, Homo sapiens
  ( 23 )...( 38 ): >MK09_HUMAN
LKRYQQLKPIGSGAQG

SEQ ID NO: 26800 - protein, 16 aa, Homo sapiens
  ( 24 )...( 39 ): >MK09_HUMAN
KRYQQLKPIGSGAQGI

SEQ ID NO: 26801 - protein, 16 aa, Homo sapiens
  ( 46 )...( 61 ): >MK09_HUMAN
TVLGISVAVKKLSRPF

SEQ ID NO: 26802 - protein, 16 aa, Homo sapiens
  ( 47 )...( 62 ): >MK09_HUMAN
VLGISVAVKKLSRPFQ

SEQ ID NO: 26803 - protein, 16 aa, Homo sapiens
  ( 48 )...( 63 ): >MK09_HUMAN
LGISVAVKKLSRPFQN

SEQ ID NO: 26804 - protein, 16 aa, Homo sapiens
  ( 49 )...( 64 ): >MK09_HUMAN
GISVAVKKLSRPFQNQ

SEQ ID NO: 26805 - protein, 16 aa, Homo sapiens
  ( 50 )...( 65 ): >MK09_HUMAN
ISVAVKKLSRPFQNQT

SEQ ID NO: 26806 - protein, 16 aa, Homo sapiens
  ( 64 )...( 79 ): >MK09_HUMAN
QTHAKRAYRELVLLKC

SEQ ID NO: 26807 - protein, 16 aa, Homo sapiens
  ( 65 )...( 80 ): >MK09_HUMAN
THAKRAYRELVLLKCV

SEQ ID NO: 26808 - protein, 16 aa, Homo sapiens
  ( 66 )...( 81 ): >MK09_HUMAN
HAKRAYRELVLLKCVN

SEQ ID NO: 26809 - protein, 16 aa, Homo sapiens
  ( 67 )...( 82 ): >MK09_HUMAN
AKRAYRELVLLKCVNH

SEQ ID NO: 26810 - protein, 16 aa, Homo sapiens
  ( 286 )...( 301 ): >MK09_HUMAN
RDKIKTSQARDLLSKM

SEQ ID NO: 26811 - protein, 16 aa, Homo sapiens
  ( 56 )...( 71 ): >MK10_HUMAN
STFTVLKRYQNLKPIG

SEQ ID NO: 26812 - protein, 16 aa, Homo sapiens
  ( 57 )...( 72 ): >MK10_HUMAN
TFTVLKRYQNLKPIGS

SEQ ID NO: 26813 - protein, 16 aa, Homo sapiens
  ( 58 )...( 73 ): >MK10_HUMAN
FTVLKRYQNLKPIGSG

SEQ ID NO: 26814 - protein, 16 aa, Homo sapiens
  ( 59 )...( 74 ): >MK10_HUMAN
TVLKRYQNLKPIGSGA

SEQ ID NO: 26815 - protein, 16 aa, Homo sapiens
  ( 60 )...( 75 ): >MK10_HUMAN
VLKRYQNLKPIGSGAQ

SEQ ID NO: 26816 - protein, 16 aa, Homo sapiens
  ( 61 )...( 76 ): >MK10_HUMAN
LKRYQNLKPIGSGAQG

SEQ ID NO: 26817 - protein, 16 aa, Homo sapiens
  ( 62 )...( 77 ): >MK10_HUMAN
KRYQNLKPIGSGAQGI

SEQ ID NO: 26818 - protein, 16 aa, Homo sapiens
  ( 84 )...( 99 ): >MK10_HUMAN
AVLDRNVAIKKLSRPF

SEQ ID NO: 26819 - protein, 16 aa, Homo sapiens
  ( 85 )...( 100 ): >MK10_HUMAN
VLDRNVAIKKLSRPFQ

SEQ ID NO: 26820 - protein, 16 aa, Homo sapiens
  ( 102 )...( 117 ): >MK10_HUMAN
QTHAKRAYRELVLMKC

SEQ ID NO: 26821 - protein, 16 aa, Homo sapiens
  ( 103 )...( 118 ): >MK10_HUMAN
THAKRAYRELVLMKCV

SEQ ID NO: 26822 - protein, 16 aa, Homo sapiens
  ( 104 )...( 119 ): >MK10_HUMAN
HAKRAYRELVLMKCVN

SEQ ID NO: 26823 - protein, 16 aa, Homo sapiens
  ( 105 )...( 120 ): >MK10_HUMAN
AKRAYRELVLMKCVNH

SEQ ID NO: 26824 - protein, 16 aa, Homo sapiens
  ( 325 )...( 340 ): >MK10_HUMAN
NKLKASQARDLLSKML

SEQ ID NO: 26825 - protein, 16 aa, Homo sapiens
  ( 326 )...( 341 ): >MK10_HUMAN
KLKASQARDLLSKMLV

SEQ ID NO: 26826 - protein, 16 aa, Homo sapiens
  ( 38 )...( 53 ): >MK11_HUMAN
VCSAYDARLRQKVAVK

SEQ ID NO: 26827 - protein, 16 aa, Homo sapiens
  ( 39 )...( 54 ): >MK11_HUMAN
CSAYDARLRQKVAVKK

SEQ ID NO: 26828 - protein, 16 aa, Homo sapiens
  ( 40 )...( 55 ): >MK11_HUMAN
SAYDARLRQKVAVKKL

SEQ ID NO: 26829 - protein, 16 aa, Homo sapiens
  ( 41 )...( 56 ): >MK11_HUMAN
AYDARLRQKVAVKKLS

SEQ ID NO: 26830 - protein, 16 aa, Homo sapiens
  ( 43 )...( 58 ): >MK11_HUMAN
DARLRQKVAVKKLSRP

SEQ ID NO: 26831 - protein, 16 aa, Homo sapiens
  ( 44 )...( 59 ): >MK11_HUMAN
ARLRQKVAVKKLSRPF

SEQ ID NO: 26832 - protein, 16 aa, Homo sapiens
  ( 46 )...( 61 ): >MK11_HUMAN
LRQKVAVKKLSRPFQS

SEQ ID NO: 26833 - protein, 16 aa, Homo sapiens
  ( 47 )...( 62 ): >MK11_HUMAN
RQKVAVKKLSRPFQSL

SEQ ID NO: 26834 - protein, 16 aa, Homo sapiens
  ( 48 )...( 63 ): >MK11_HUMAN
QKVAVKKLSRPFQSLI

SEQ ID NO: 26835 - protein, 16 aa, Homo sapiens
  ( 49 )...( 64 ): >MK11_HUMAN
KVAVKKLSRPFQSLIH

SEQ ID NO: 26836 - protein, 16 aa, Homo sapiens
  ( 51 )...( 66 ): >MK11_HUMAN
AVKKLSRPFQSLIHAR

SEQ ID NO: 26837 - protein, 16 aa, Homo sapiens
  ( 142 )...( 157 ): >MK11_HUMAN
LLRGLKYIHSAGIIHR

SEQ ID NO: 26838 - protein, 16 aa, Homo sapiens
  ( 39 )...( 54 ): >MK14_HUMAN
CAAFDTKTGLRVAVKK

SEQ ID NO: 26839 - protein, 16 aa, Homo sapiens
  ( 40 )...( 55 ): >MK14_HUMAN
AAFDTKTGLRVAVKKL

SEQ ID NO: 26840 - protein, 16 aa, Homo sapiens
  ( 42 )...( 57 ): >MK14_HUMAN
FDTKTGLRVAVKKLSR

SEQ ID NO: 26841 - protein, 16 aa, Homo sapiens
  ( 43 )...( 58 ): >MK14_HUMAN
DTKTGLRVAVKKLSRP

SEQ ID NO: 26842 - protein, 16 aa, Homo sapiens
  ( 44 )...( 59 ): >MK14_HUMAN
TKTGLRVAVKKLSRPF

SEQ ID NO: 26843 - protein, 16 aa, Homo sapiens
  ( 45 )...( 60 ): >MK14_HUMAN
KTGLRVAVKKLSRPFQ

SEQ ID NO: 26844 - protein, 16 aa, Homo sapiens
  ( 46 )...( 61 ): >MK14_HUMAN
TGLRVAVKKLSRPFQS

SEQ ID NO: 26845 - protein, 16 aa, Homo sapiens
  ( 47 )...( 62 ): >MK14_HUMAN
GLRVAVKKLSRPFQSI

SEQ ID NO: 26846 - protein, 16 aa, Homo sapiens
  ( 48 )...( 63 ): >MK14_HUMAN
LRVAVKKLSRPFQSII

SEQ ID NO: 26847 - protein, 16 aa, Homo sapiens
  ( 49 )...( 64 ): >MK14_HUMAN
RVAVKKLSRPFQSIIH

SEQ ID NO: 26848 - protein, 16 aa, Homo sapiens
  ( 51 )...( 66 ): >MK14_HUMAN
AVKKLSRPFQSIIHAK

SEQ ID NO: 26849 - protein, 16 aa, Homo sapiens
  ( 31 )...( 46 ): >MLX_HUMAN
RARRGAGRRGASLLSP

SEQ ID NO: 26850 - protein, 16 aa, Homo sapiens
  ( 33 )...( 48 ): >MLX_HUMAN
RRGAGRRGASLLSPKS

SEQ ID NO: 26851 - protein, 16 aa, Homo sapiens
  ( 133 )...( 148 ): >MLX_HUMAN
AHTQAEQKRRDAIKRG

SEQ ID NO: 26852 - protein, 16 aa, Homo sapiens
  ( 200 )...( 215 ): >MLX_HUMAN
TLRKDVTALKIMKVNY

SEQ ID NO: 26853 - protein, 16 aa, Homo sapiens
  ( 207 )...( 222 ): >MNT_HUMAN
VKSSEQKKRPGGIGTR

SEQ ID NO: 26854 - protein, 16 aa, Homo sapiens
  ( 208 )...( 223 ): >MNT_HUMAN
KSSEQKKRPGGIGTRE

SEQ ID NO: 26855 - protein, 16 aa, Homo sapiens
  ( 212 )...( 227 ): >MNT_HUMAN
QKKRPGGIGTREVHNK

SEQ ID NO: 26856 - protein, 16 aa, Homo sapiens
  ( 213 )...( 228 ): >MNT_HUMAN
KKRPGGIGTREVHNKL

SEQ ID NO: 26857 - protein, 16 aa, Homo sapiens
  ( 218 )...( 233 ): >MNT_HUMAN
GIGTREVHNKLEKNRR

SEQ ID NO: 26858 - protein, 16 aa, Homo sapiens
  ( 252 )...( 267 ): >MNT_HUMAN
DKKTSNLSVLRTALRY

SEQ ID NO: 26859 - protein, 16 aa, Homo sapiens
  ( 253 )...( 268 ): >MNT_HUMAN
KKTSNLSVLRTALRYI

SEQ ID NO: 26860 - protein, 16 aa, Homo sapiens
  ( 254 )...( 269 ): >MNT_HUMAN
KTSNLSVLRTALRYIQ

SEQ ID NO: 26861 - protein, 16 aa, Homo sapiens
  ( 257 )...( 272 ): >MNT_HUMAN
NLSVLRTALRYIQSLK

SEQ ID NO: 26862 - protein, 16 aa, Homo sapiens
  ( 258 )...( 273 ): >MNT_HUMAN
LSVLRTALRYIQSLKR

SEQ ID NO: 26863 - protein, 16 aa, Homo sapiens
  ( 259 )...( 274 ): >MNT_HUMAN
SVLRTALRYIQSLKRK

SEQ ID NO: 26864 - protein, 16 aa, Homo sapiens
  ( 260 )...( 275 ): >MNT_HUMAN
VLRTALRYIQSLKRKE

SEQ ID NO: 26865 - protein, 16 aa, Homo sapiens
  ( 1 )...( 16 ): >MOR4_HUMAN
MRWAAPGKKTSGLQQK

SEQ ID NO: 26866 - protein, 16 aa, Homo sapiens
  ( 2 )...( 17 ): >MOR4_HUMAN
RWAAPGKKTSGLQQKN

SEQ ID NO: 26867 - protein, 16 aa, Homo sapiens
  ( 8 )...( 23 ): >MOR4_HUMAN
KKTSGLQQKNIEVKTK

SEQ ID NO: 26868 - protein, 16 aa, Homo sapiens
  ( 9 )...( 24 ): >MOR4_HUMAN
KTSGLQQKNIEVKTKK

SEQ ID NO: 26869 - protein, 16 aa, Homo sapiens
  ( 11 )...( 26 ): >MOR4_HUMAN
SGLQQKNIEVKTKKNK

SEQ ID NO: 26870 - protein, 16 aa, Homo sapiens
  ( 12 )...( 27 ): >MOR4_HUMAN
GLQQKNIEVKTKKNKQ

SEQ ID NO: 26871 - protein, 16 aa, Homo sapiens
  ( 16 )...( 31 ): >MOR4_HUMAN
KNIEVKTKKNKQKTPG

SEQ ID NO: 26872 - protein, 16 aa, Homo sapiens
  ( 17 )...( 32 ): >MOR4_HUMAN
NIEVKTKKNKQKTPGN

SEQ ID NO: 26873 - protein, 16 aa, Homo sapiens
  ( 18 )...( 33 ): >MOR4_HUMAN
IEVKTKKNKQKTPGNG

SEQ ID NO: 26874 - protein, 16 aa, Homo sapiens
  ( 20 )...( 35 ): >MOR4_HUMAN
VKTKKNKQKTPGNGDG

SEQ ID NO: 26875 - protein, 16 aa, Homo sapiens
  ( 37 )...( 52 ): >MOR4_HUMAN
STSETPQPPRKKRAQV

SEQ ID NO: 26876 - protein, 16 aa, Homo sapiens
  ( 41 )...( 56 ): >MOR4_HUMAN
TPQPPRKKRAQVDPTV

SEQ ID NO: 26877 - protein, 16 aa, Homo sapiens
  ( 1 )...( 16 ): >MTG8_HUMAN
MISVKRNTWRALSLVI

SEQ ID NO: 26878 - protein, 16 aa, Homo sapiens
  ( 2 )...( 17 ): >MTG8_HUMAN
ISVKRNTWRALSLVIG

SEQ ID NO: 26879 - protein, 16 aa, Homo sapiens
  ( 5 )...( 20 ): >MTG8_HUMAN
KRNTWRALSLVIGDCR

SEQ ID NO: 26880 - protein, 16 aa, Homo sapiens
  ( 6 )...( 21 ): >MTG8_HUMAN
RNTWRALSLVIGDCRK

SEQ ID NO: 26881 - protein, 16 aa, Homo sapiens
  ( 7 )...( 22 ): >MTG8_HUMAN
NTWRALSLVIGDCRKK

SEQ ID NO: 26882 - protein, 16 aa, Homo sapiens
  ( 8 )...( 23 ): >MTG8_HUMAN
TWRALSLVIGDCRKKG

SEQ ID NO: 26883 - protein, 16 aa, Homo sapiens
  ( 113 )...( 128 ): >MTG8_HUMAN
QLPPACGARQLSKLKR

SEQ ID NO: 26884 - protein, 16 aa, Homo sapiens
  ( 116 )...( 131 ): >MTG8_HUMAN
PACGARQLSKLKRFLT

SEQ ID NO: 26885 - protein, 16 aa, Homo sapiens
  ( 117 )...( 132 ): >MTG8_HUMAN
ACGARQLSKLKRFLTT

SEQ ID NO: 26886 - protein, 16 aa, Homo sapiens
  ( 118 )...( 133 ): >MTG8_HUMAN
CGARQLSKLKRFLTTL

SEQ ID NO: 26887 - protein, 16 aa, Homo sapiens
  ( 119 )...( 134 ): >MTG8_HUMAN
GARQLSKLKRFLTTLQ

SEQ ID NO: 26888 - protein, 16 aa, Homo sapiens
  ( 120 )...( 135 ): >MTG8_HUMAN
ARQLSKLKRFLTTLQQ

SEQ ID NO: 26889 - protein, 16 aa, Homo sapiens
  ( 122 )...( 137 ): >MTG8_HUMAN
QLSKLKRFLTTLQQFG

SEQ ID NO: 26890 - protein, 16 aa, Homo sapiens
  ( 123 )...( 138 ): >MTG8_HUMAN
LSKLKRFLTTLQQFGN

SEQ ID NO: 26891 - protein, 16 aa, Homo sapiens
  ( 365 )...( 380 ): >MTG8_HUMAN
MDMVEKTRRSLTVLRR

SEQ ID NO: 26892 - protein, 16 aa, Homo sapiens
  ( 366 )...( 381 ): >MTG8_HUMAN
DMVEKTRRSLTVLRRC

SEQ ID NO: 26893 - protein, 16 aa, Homo sapiens
  ( 367 )...( 382 ): >MTG8_HUMAN
MVEKTRRSLTVLRRCQ

SEQ ID NO: 26894 - protein, 16 aa, Homo sapiens
  ( 368 )...( 383 ): >MTG8_HUMAN
VEKTRRSLTVLRRCQE

SEQ ID NO: 26895 - protein, 16 aa, Homo sapiens
  ( 369 )...( 384 ): >MTG8_HUMAN
EKTRRSLTVLRRCQEA

SEQ ID NO: 26896 - protein, 16 aa, Homo sapiens
  ( 370 )...( 385 ): >MTG8_HUMAN
KTRRSLTVLRRCQEAD

SEQ ID NO: 26897 - protein, 16 aa, Homo sapiens
  ( 371 )...( 386 ): >MTG8_HUMAN
TRRSLTVLRRCQEADR

SEQ ID NO: 26898 - protein, 16 aa, Homo sapiens
  ( 483 )...( 498 ): >MTG8_HUMAN
RAKMERTVAEAKRQAA

SEQ ID NO: 26899 - protein, 16 aa, Homo sapiens
  ( 14 )...( 29 ): >MUSC_HUMAN
LRGLQREYPVPASKRP

SEQ ID NO: 26900 - protein, 16 aa, Homo sapiens
  ( 61 )...( 76 ): >MUSC_HUMAN
LGTAGSAEGCKRKRPR

SEQ ID NO: 26901 - protein, 16 aa, Homo sapiens
  ( 63 )...( 78 ): >MUSC_HUMAN
TAGSAEGCKRKRPRVA

SEQ ID NO: 26902 - protein, 16 aa, Homo sapiens
  ( 110 )...( 125 ): >MUSC_HUMAN
NAANARERARMRVLSK

SEQ ID NO: 26903 - protein, 16 aa, Homo sapiens
  ( 111 )...( 126 ): >MUSC_HUMAN
AANARERARMRVLSKA

SEQ ID NO: 26904 - protein, 16 aa, Homo sapiens
  ( 117 )...( 132 ): >MUSC_HUMAN
RARMRVLSKAFSRLKT

SEQ ID NO: 26905 - protein, 16 aa, Homo sapiens
  ( 118 )...( 133 ): >MUSC_HUMAN
ARMRVLSKAFSRLKTS

SEQ ID NO: 26906 - protein, 16 aa, Homo sapiens
  ( 119 )...( 134 ): >MUSC_HUMAN
RMRVLSKAFSRLKTSL

SEQ ID NO: 26907 - protein, 16 aa, Homo sapiens
  ( 120 )...( 135 ): >MUSC_HUMAN
MRVLSKAFSRLKTSLP

SEQ ID NO: 26908 - protein, 16 aa, Homo sapiens
  ( 121 )...( 136 ): >MUSC_HUMAN
RVLSKAFSRLKTSLPW

SEQ ID NO: 26909 - protein, 16 aa, Homo sapiens
  ( 122 )...( 137 ): >MUSC_HUMAN
VLSKAFSRLKTSLPWV

SEQ ID NO: 26910 - protein, 16 aa, Homo sapiens
  ( 46 )...( 61 ): >MXI1_HUMAN
KPPRRLSRAQKHSSGT

SEQ ID NO: 26911 - protein, 16 aa, Homo sapiens
  ( 49 )...( 64 ): >MXI1_HUMAN
RRLSRAQKHSSGTSNT

SEQ ID NO: 26912 - protein, 16 aa, Homo sapiens
  ( 79 )...( 94 ): >MXI1_HUMAN
RRAHLRLCLERLKVLI

SEQ ID NO: 26913 - protein, 16 aa, Homo sapiens
  ( 80 )...( 95 ): >MXI1_HUMAN
RAHLRLCLERLKVLIP

SEQ ID NO: 26914 - protein, 16 aa, Homo sapiens
  ( 102 )...( 117 ): >MXI1_HUMAN
RHTTLGLLNKAKAHIK

SEQ ID NO: 26915 - protein, 16 aa, Homo sapiens
  ( 104 )...( 119 ): >MXI1_HUMAN
TTLGLLNKAKAHIKKL

SEQ ID NO: 26916 - protein, 16 aa, Homo sapiens
  ( 76 )...( 91 ): >MYCL_HUMAN
RGHSKGWGRNYASIIR

SEQ ID NO: 26917 - protein, 16 aa, Homo sapiens
  ( 77 )...( 92 ): >MYCL_HUMAN
GHSKGWGRNYASIIRR

SEQ ID NO: 26918 - protein, 16 aa, Homo sapiens
  ( 172 )...( 187 ): >MYCL_HUMAN
VVTVEKRQSLGIRKPV

SEQ ID NO: 26919 - protein, 16 aa, Homo sapiens
  ( 173 )...( 188 ): >MYCL_HUMAN
VTVEKRQSLGIRKPVT

SEQ ID NO: 26920 - protein, 16 aa, Homo sapiens
  ( 174 )...( 189 ): >MYCL_HUMAN
TVEKRQSLGIRKPVTI

SEQ ID NO: 26921 - protein, 16 aa, Homo sapiens
  ( 175 )...( 190 ): >MYCL_HUMAN
VEKRQSLGIRKPVTIT

SEQ ID NO: 26922 - protein, 16 aa, Homo sapiens
  ( 176 )...( 191 ): >MYCL_HUMAN
EKRQSLGIRKPVTITV

SEQ ID NO: 26923 - protein, 16 aa, Homo sapiens
  ( 177 )...( 192 ): >MYCL_HUMAN
KRQSLGIRKPVTITVR

SEQ ID NO: 26924 - protein, 16 aa, Homo sapiens
  ( 178 )...( 193 ): >MYCL_HUMAN
RQSLGIRKPVTITVRA

SEQ ID NO: 26925 - protein, 16 aa, Homo sapiens
  ( 333 )...( 348 ): >MYCL_HUMAN
LVGAEKRMATEKRQLR

SEQ ID NO: 26926 - protein, 16 aa, Homo sapiens
  ( 334 )...( 349 ): >MYCL_HUMAN
VGAEKRMATEKRQLRC

SEQ ID NO: 26927 - protein, 16 aa, Homo sapiens
  ( 335 )...( 350 ): >MYCL_HUMAN
GAEKRMATEKRQLRCR

SEQ ID NO: 26928 - protein, 16 aa, Homo sapiens
  ( 348 )...( 363 ): >MYCL_HUMAN
RCRQQQLQKRIAYLSG

SEQ ID NO: 26929 - protein, 16 aa, Homo sapiens
  ( 349 )...( 364 ): >MYCL_HUMAN
CRQQQLQKRIAYLSGY

SEQ ID NO: 26930 - protein, 16 aa, Homo sapiens
  ( 164 )...( 179 ): >MYCM_HUMAN
IDVTVKKRQSLSTRKP

SEQ ID NO: 26931 - protein, 16 aa, Homo sapiens
  ( 165 )...( 180 ): >MYCM_HUMAN
DVTVKKRQSLSTRKPV

SEQ ID NO: 26932 - protein, 16 aa, Homo sapiens
  ( 166 )...( 181 ): >MYCM_HUMAN
VTVKKRQSLSTRKPVI

SEQ ID NO: 26933 - protein, 16 aa, Homo sapiens
  ( 167 )...( 182 ): >MYCM_HUMAN
TVKKRQSLSTRKPVII

SEQ ID NO: 26934 - protein, 16 aa, Homo sapiens
  ( 168 )...( 183 ): >MYCM_HUMAN
VKKRQSLSTRKPVIIA

SEQ ID NO: 26935 - protein, 16 aa, Homo sapiens
  ( 169 )...( 184 ): >MYCM_HUMAN
KKRQSLSTRKPVIIAV

SEQ ID NO: 26936 - protein, 16 aa, Homo sapiens
  ( 170 )...( 185 ): >MYCM_HUMAN
KRQSLSTRKPVIIAVR

SEQ ID NO: 26937 - protein, 16 aa, Homo sapiens
  ( 171 )...( 186 ): >MYCM_HUMAN
RQSLSTRKPVIIAVRA

SEQ ID NO: 26938 - protein, 16 aa, Homo sapiens
  ( 284 )...( 299 ): >MYCN_HUMAN
KRRSSSNTKAVTTFTI

SEQ ID NO: 26939 - protein, 16 aa, Homo sapiens
  ( 347 )...( 362 ): >MYCN_HUMAN
QKKIKSEASPRPLKSV

SEQ ID NO: 26940 - protein, 16 aa, Homo sapiens
  ( 348 )...( 363 ): >MYCN_HUMAN
KKIKSEASPRPLKSVI

SEQ ID NO: 26941 - protein, 16 aa, Homo sapiens
  ( 411 )...( 426 ): >MYCN_HUMAN
LVKNEKAAKVVILKKA

SEQ ID NO: 26942 - protein, 16 aa, Homo sapiens
  ( 412 )...( 427 ): >MYCN_HUMAN
VKNEKAAKVVILKKAT

SEQ ID NO: 26943 - protein, 16 aa, Homo sapiens
  ( 446 )...( 461 ): >MYCN_HUMAN
KLQARQQQLLKKIEHA

SEQ ID NO: 26944 - protein, 16 aa, Homo sapiens
  ( 448 )...( 463 ): >MYCN_HUMAN
QARQQQLLKKIEHART

SEQ ID NO: 26945 - protein, 16 aa, Homo sapiens
  ( 449 )...( 464 ): >MYCN_HUMAN
ARQQQLLKKIEHARTC

SEQ ID NO: 26946 - protein, 15 aa, Homo sapiens
  ( 450 )...( 465 ): >MYCN_HUMAN
RQQQLLKKIEHARTC

SEQ ID NO: 26947 - protein, 16 aa, Homo sapiens
  ( 142 )...( 157 ): >MYC_HUMAN
AKLVSEKLASYQAARK

SEQ ID NO: 26948 - protein, 16 aa, Homo sapiens
  ( 314 )...( 329 ): >MYC_HUMAN
STRKDYPAAKRVKLDS

SEQ ID NO: 26949 - protein, 16 aa, Homo sapiens
  ( 315 )...( 330 ): >MYC_HUMAN
TRKDYPAAKRVKLDSV

SEQ ID NO: 26950 - protein, 16 aa, Homo sapiens
  ( 317 )...( 332 ): >MYC_HUMAN
KDYPAAKRVKLDSVRV

SEQ ID NO: 26951 - protein, 16 aa, Homo sapiens
  ( 319 )...( 334 ): >MYC_HUMAN
YPAAKRVKLDSVRVLR

SEQ ID NO: 26952 - protein, 16 aa, Homo sapiens
  ( 320 )...( 335 ): >MYC_HUMAN
PAAKRVKLDSVRVLRQ

SEQ ID NO: 26953 - protein, 16 aa, Homo sapiens
  ( 321 )...( 336 ): >MYC_HUMAN
AAKRVKLDSVRVLRQI

SEQ ID NO: 26954 - protein, 16 aa, Homo sapiens
  ( 322 )...( 337 ): >MYC_HUMAN
AKRVKLDSVRVLRQIS

SEQ ID NO: 26955 - protein, 16 aa, Homo sapiens
  ( 323 )...( 338 ): >MYC_HUMAN
KRVKLDSVRVLRQISN

SEQ ID NO: 26956 - protein, 16 aa, Homo sapiens
  ( 324 )...( 339 ): >MYC_HUMAN
RVKLDSVRVLRQISNN

SEQ ID NO: 26957 - protein, 16 aa, Homo sapiens
  ( 325 )...( 340 ): >MYC_HUMAN
VKLDSVRVLRQISNNR

SEQ ID NO: 26958 - protein, 16 aa, Homo sapiens
  ( 327 )...( 342 ): >MYC_HUMAN
LDSVRVLRQISNNRKC

SEQ ID NO: 26959 - protein, 16 aa, Homo sapiens
  ( 328 )...( 343 ): >MYC_HUMAN
DSVRVLRQISNNRKCT

SEQ ID NO: 26960 - protein, 16 aa, Homo sapiens
  ( 329 )...( 344 ): >MYC_HUMAN
SVRVLRQISNNRKCTS

SEQ ID NO: 26961 - protein, 16 aa, Homo sapiens
  ( 330 )...( 345 ): >MYC_HUMAN
VRVLRQISNNRKCTSP

SEQ ID NO: 26962 - protein, 16 aa, Homo sapiens
  ( 332 )...( 347 ): >MYC_HUMAN
VLRQISNNRKCTSPRS

SEQ ID NO: 26963 - protein, 16 aa, Homo sapiens
  ( 389 )...( 404 ): >MYC_HUMAN
KAPKVVILKKATAYIL

SEQ ID NO: 26964 - protein, 16 aa, Homo sapiens
  ( 71 )...( 86 ): >MYF5_HUMAN
ACKACKRKSTTMDRRK

SEQ ID NO: 26965 - protein, 16 aa, Homo sapiens
  ( 72 )...( 87 ): >MYF5_HUMAN
CKACKRKSTTMDRRKA

SEQ ID NO: 26966 - protein, 16 aa, Homo sapiens
  ( 73 )...( 88 ): >MYF5_HUMAN
KACKRKSTTMDRRKAA

SEQ ID NO: 26967 - protein, 16 aa, Homo sapiens
  ( 74 )...( 89 ): >MYF5_HUMAN
ACKRKSTTMDRRKAAT

SEQ ID NO: 26968 - protein, 16 aa, Homo sapiens
  ( 75 )...( 90 ): >MYF5_HUMAN
CKRKSTTMDRRKAATM

SEQ ID NO: 26969 - protein, 16 aa, Homo sapiens
  ( 95 )...( 110 ): >MYF5_HUMAN
RLKKVNQAFETLKRCT

SEQ ID NO: 26970 - protein, 16 aa, Homo sapiens
  ( 105 )...( 120 ): >MYF5_HUMAN
TLKRCTTTNPNQRLPK

SEQ ID NO: 26971 - protein, 16 aa, Homo sapiens
  ( 106 )...( 121 ): >MYF5_HUMAN
LKRCTTTNPNQRLPKV

SEQ ID NO: 26972 - protein, 16 aa, Homo sapiens
  ( 107 )...( 122 ): >MYF5_HUMAN
KRCTTTNPNQRLPKVE

SEQ ID NO: 26973 - protein, 16 aa, Homo sapiens
  ( 81 )...( 96 ): >MYF6_HUMAN
ACKTCKRKSAPTDRRK

SEQ ID NO: 26974 - protein, 16 aa, Homo sapiens
  ( 82 )...( 97 ): >MYF6_HUMAN
CKTCKRKSAPTDRRKA

SEQ ID NO: 26975 - protein, 16 aa, Homo sapiens
  ( 83 )...( 98 ): >MYF6_HUMAN
KTCKRKSAPTDRRKAA

SEQ ID NO: 26976 - protein, 16 aa, Homo sapiens
  ( 84 )...( 99 ): >MYF6_HUMAN
TCKRKSAPTDRRKAAT

SEQ ID NO: 26977 - protein, 16 aa, Homo sapiens
  ( 85 )...( 100 ): >MYF6_HUMAN
CKRKSAPTDRRKAATL

SEQ ID NO: 26978 - protein, 16 aa, Homo sapiens
  ( 87 )...( 102 ): >MYF6_HUMAN
RKSAPTDRRKAATLRE

SEQ ID NO: 26979 - protein, 16 aa, Homo sapiens
  ( 88 )...( 103 ): >MYF6_HUMAN
KSAPTDRRKAATLRER

SEQ ID NO: 26980 - protein, 16 aa, Homo sapiens
  ( 106 )...( 121 ): >MYF6_HUMAN
LKKINEAFEALKRRTV

SEQ ID NO: 26981 - protein, 16 aa, Homo sapiens
  ( 107 )...( 122 ): >MYF6_HUMAN
KKINEAFEALKRRTVA

SEQ ID NO: 26982 - protein, 16 aa, Homo sapiens
  ( 97 )...( 112 ): >MYOD_HUMAN
ACKACKRKTTNADRRK

SEQ ID NO: 26983 - protein, 16 aa, Homo sapiens
  ( 98 )...( 113 ): >MYOD_HUMAN
CKACKRKTTNADRRKA

SEQ ID NO: 26984 - protein, 16 aa, Homo sapiens
  ( 99 )...( 114 ): >MYOD_HUMAN
KACKRKTTNADRRKAA

SEQ ID NO: 26985 - protein, 16 aa, Homo sapiens
  ( 100 )...( 115 ): >MYOD_HUMAN
ACKRKTTNADRRKAAT

SEQ ID NO: 26986 - protein, 16 aa, Homo sapiens
  ( 101 )...( 116 ): >MYOD_HUMAN
CKRKTTNADRRKAATM

SEQ ID NO: 26987 - protein, 16 aa, Homo sapiens
  ( 113 )...( 128 ): >MYOD_HUMAN
AATMRERRRLSKVNEA

SEQ ID NO: 26988 - protein, 16 aa, Homo sapiens
  ( 68 )...( 83 ): >MYOG_HUMAN
WACKVCKRKSVSVDRR

SEQ ID NO: 26989 - protein, 16 aa, Homo sapiens
  ( 69 )...( 84 ): >MYOG_HUMAN
ACKVCKRKSVSVDRRR

SEQ ID NO: 26990 - protein, 16 aa, Homo sapiens
  ( 70 )...( 85 ): >MYOG_HUMAN
CKVCKRKSVSVDRRRA

SEQ ID NO: 26991 - protein, 16 aa, Homo sapiens
  ( 71 )...( 86 ): >MYOG_HUMAN
KVCKRKSVSVDRRRAA

SEQ ID NO: 26992 - protein, 16 aa, Homo sapiens
  ( 72 )...( 87 ): >MYOG_HUMAN
VCKRKSVSVDRRRAAT

SEQ ID NO: 26993 - protein, 16 aa, Homo sapiens
  ( 73 )...( 88 ): >MYOG_HUMAN
CKRKSVSVDRRRAATL

SEQ ID NO: 26994 - protein, 16 aa, Homo sapiens
  ( 74 )...( 89 ): >MYOG_HUMAN
KRKSVSVDRRRAATLR

SEQ ID NO: 26995 - protein, 16 aa, Homo sapiens
  ( 75 )...( 90 ): >MYOG_HUMAN
RKSVSVDRRRAATLRE

SEQ ID NO: 26996 - protein, 16 aa, Homo sapiens
  ( 76 )...( 91 ): >MYOG_HUMAN
KSVSVDRRRAATLREK

SEQ ID NO: 26997 - protein, 16 aa, Homo sapiens
  ( 77 )...( 92 ): >MYOG_HUMAN
SVSVDRRRAATLREKR

SEQ ID NO: 26998 - protein, 16 aa, Homo sapiens
  ( 85 )...( 100 ): >MYOG_HUMAN
AATLREKRRLKKVNEA

SEQ ID NO: 26999 - protein, 16 aa, Homo sapiens
  ( 93 )...( 108 ): >MYOG_HUMAN
RLKKVNEAFEALKRST

SEQ ID NO: 27000 - protein, 16 aa, Homo sapiens
  ( 104 )...( 119 ): >MYOG_HUMAN
LKRSTLLNPNQRLPKV

SEQ ID NO: 27001 - protein, 16 aa, Homo sapiens
  ( 52 )...( 67 ): >NAB1_HUMAN
IMALVGMASKPLHVRR

SEQ ID NO: 27002 - protein, 16 aa, Homo sapiens
  ( 53 )...( 68 ): >NAB1_HUMAN
MALVGMASKPLHVRRL

SEQ ID NO: 27003 - protein, 16 aa, Homo sapiens
  ( 54 )...( 69 ): >NAB1_HUMAN
ALVGMASKPLHVRRLQ

SEQ ID NO: 27004 - protein, 16 aa, Homo sapiens
  ( 55 )...( 70 ): >NAB1_HUMAN
LVGMASKPLHVRRLQK

SEQ ID NO: 27005 - protein, 16 aa, Homo sapiens
  ( 56 )...( 71 ): >NAB1_HUMAN
VGMASKPLHVRRLQKA

SEQ ID NO: 27006 - protein, 16 aa, Homo sapiens
  ( 57 )...( 72 ): >NAB1_HUMAN
GMASKPLHVRRLQKAL

SEQ ID NO: 27007 - protein, 16 aa, Homo sapiens
  ( 58 )...( 73 ): >NAB1_HUMAN
MASKPLHVRRLQKALR

SEQ ID NO: 27008 - protein, 16 aa, Homo sapiens
  ( 65 )...( 80 ): >NAB1_HUMAN
VRRLQKALRDWVTNPG

SEQ ID NO: 27009 - protein, 16 aa, Homo sapiens
  ( 218 )...( 233 ): >NAB1_HUMAN
VKELLKTNKKLAKMIG

SEQ ID NO: 27010 - protein, 16 aa, Homo sapiens
  ( 219 )...( 234 ): >NAB1_HUMAN
KELLKTNKKLAKMIGH

SEQ ID NO: 27011 - protein, 16 aa, Homo sapiens
  ( 221 )...( 236 ): >NAB1_HUMAN
LLKTNKKLAKMIGHIF

SEQ ID NO: 27012 - protein, 16 aa, Homo sapiens
  ( 309 )...( 324 ): >NAB1_HUMAN
TYKYTYRTTKSKCGER

SEQ ID NO: 27013 - protein, 16 aa, Homo sapiens
  ( 318 )...( 333 ): >NAB1_HUMAN
KSKCGERDELSPKRIK

SEQ ID NO: 27014 - protein, 16 aa, Homo sapiens
  ( 13 )...( 28 ): >NAB2_HUMAN
PGGGDSARRTLQPRLK

SEQ ID NO: 27015 - protein, 16 aa, Homo sapiens
  ( 14 )...( 29 ): >NAB2_HUMAN
GGGDSARRTLQPRLKP

SEQ ID NO: 27016 - protein, 16 aa, Homo sapiens
  ( 15 )...( 30 ): >NAB2_HUMAN
GGDSARRTLQPRLKPS

SEQ ID NO: 27017 - protein, 16 aa, Homo sapiens
  ( 16 )...( 31 ): >NAB2_HUMAN
GDSARRTLQPRLKPSA

SEQ ID NO: 27018 - protein, 16 aa, Homo sapiens
  ( 18 )...( 33 ): >NAB2_HUMAN
SARRTLQPRLKPSARA

SEQ ID NO: 27019 - protein, 16 aa, Homo sapiens
  ( 19 )...( 34 ): >NAB2_HUMAN
ARRTLQPRLKPSARAM

SEQ ID NO: 27020 - protein, 16 aa, Homo sapiens
  ( 20 )...( 35 ): >NAB2_HUMAN
RRTLQPRLKPSARAMA

SEQ ID NO: 27021 - protein, 16 aa, Homo sapiens
  ( 21 )...( 36 ): >NAB2_HUMAN
RTLQPRLKPSARAMAL

SEQ ID NO: 27022 - protein, 16 aa, Homo sapiens
  ( 23 )...( 38 ): >NAB2_HUMAN
LQPRLKPSARAMALPR

SEQ ID NO: 27023 - protein, 16 aa, Homo sapiens
  ( 24 )...( 39 ): >NAB2_HUMAN
QPRLKPSARAMALPRT

SEQ ID NO: 27024 - protein, 16 aa, Homo sapiens
  ( 25 )...( 40 ): >NAB2_HUMAN
PRLKPSARAMALPRTL

SEQ ID NO: 27025 - protein, 16 aa, Homo sapiens
  ( 26 )...( 41 ): >NAB2_HUMAN
RLKPSARAMALPRTLG

SEQ ID NO: 27026 - protein, 16 aa, Homo sapiens
  ( 83 )...( 98 ): >NAB2_HUMAN
IMALVGMATKPLHVRR

SEQ ID NO: 27027 - protein, 16 aa, Homo sapiens
  ( 84 )...( 99 ): >NAB2_HUMAN
MALVGMATKPLHVRRL

SEQ ID NO: 27028 - protein, 16 aa, Homo sapiens
  ( 85 )...( 100 ): >NAB2_HUMAN
ALVGMATKPLHVRRLQ

SEQ ID NO: 27029 - protein, 16 aa, Homo sapiens
  ( 86 )...( 101 ): >NAB2_HUMAN
LVGMATKPLHVRRLQK

SEQ ID NO: 27030 - protein, 16 aa, Homo sapiens
  ( 87 )...( 102 ): >NAB2_HUMAN
VGMATKPLHVRRLQKA

SEQ ID NO: 27031 - protein, 16 aa, Homo sapiens
  ( 88 )...( 103 ): >NAB2_HUMAN
GMATKPLHVRRLQKAL

SEQ ID NO: 27032 - protein, 16 aa, Homo sapiens
  ( 89 )...( 104 ): >NAB2_HUMAN
MATKPLHVRRLQKALR

SEQ ID NO: 27033 - protein, 16 aa, Homo sapiens
  ( 90 )...( 105 ): >NAB2_HUMAN
ATKPLHVRRLQKALRE

SEQ ID NO: 27034 - protein, 16 aa, Homo sapiens
  ( 96 )...( 111 ): >NAB2_HUMAN
VRRLQKALREWATNPG

SEQ ID NO: 27035 - protein, 16 aa, Homo sapiens
  ( 261 )...( 276 ): >NAB2_HUMAN
AGEVTSLLKLNKKLAR

SEQ ID NO: 27036 - protein, 16 aa, Homo sapiens
  ( 264 )...( 279 ): >NAB2_HUMAN
VTSLLKLNKKLARSVG

SEQ ID NO: 27037 - protein, 16 aa, Homo sapiens
  ( 265 )...( 280 ): >NAB2_HUMAN
TSLLKLNKKLARSVGH

SEQ ID NO: 27038 - protein, 16 aa, Homo sapiens
  ( 266 )...( 281 ): >NAB2_HUMAN
SLLKLNKKLARSVGHI

SEQ ID NO: 27039 - protein, 16 aa, Homo sapiens
  ( 267 )...( 282 ): >NAB2_HUMAN
LLKLNKKLARSVGHIF

SEQ ID NO: 27040 - protein, 16 aa, Homo sapiens
  ( 337 )...( 352 ): >NAB2_HUMAN
LLRRVELFSLSRQVAR

SEQ ID NO: 27041 - protein, 16 aa, Homo sapiens
  ( 463 )...( 478 ): >NAB2_HUMAN
GLRLARLVSHDRVGRL

SEQ ID NO: 27042 - protein, 16 aa, Homo sapiens
  ( 464 )...( 479 ): >NAB2_HUMAN
LRLARLVSHDRVGRLS

SEQ ID NO: 27043 - protein, 16 aa, Homo sapiens
  ( 465 )...( 480 ): >NAB2_HUMAN
RLARLVSHDRVGRLSP

SEQ ID NO: 27044 - protein, 16 aa, Homo sapiens
  ( 121 )...( 136 ): >NDF1_HUMAN
LDNLRKVVPCYSKTQK

SEQ ID NO: 27045 - protein, 16 aa, Homo sapiens
  ( 122 )...( 137 ): >NDF1_HUMAN
DNLRKVVPCYSKTQKL

SEQ ID NO: 27046 - protein, 16 aa, Homo sapiens
  ( 123 )...( 138 ): >NDF1_HUMAN
NLRKVVPCYSKTQKLS

SEQ ID NO: 27047 - protein, 16 aa, Homo sapiens
  ( 124 )...( 139 ): >NDF1_HUMAN
LRKVVPCYSKTQKLSK

SEQ ID NO: 27048 - protein, 16 aa, Homo sapiens
  ( 125 )...( 140 ): >NDF1_HUMAN
RKVVPCYSKTQKLSKI

SEQ ID NO: 27049 - protein, 16 aa, Homo sapiens
  ( 132 )...( 147 ): >NDF1_HUMAN
SKTQKLSKIETLRLAK

SEQ ID NO: 27050 - protein, 16 aa, Homo sapiens
  ( 133 )...( 148 ): >NDF1_HUMAN
KTQKLSKIETLRLAKN

SEQ ID NO: 27051 - protein, 16 aa, Homo sapiens
  ( 135 )...( 150 ): >NDF1_HUMAN
QKLSKIETLRLAKNYI

SEQ ID NO: 27052 - protein, 16 aa, Homo sapiens
  ( 141 )...( 156 ): >NDF2_HUMAN
LDNLRKVVPCYSKTQK

SEQ ID NO: 27053 - protein, 16 aa, Homo sapiens
  ( 142 )...( 157 ): >NDF2_HUMAN
DNLRKVVPCYSKTQKL

SEQ ID NO: 27054 - protein, 16 aa, Homo sapiens
  ( 143 )...( 158 ): >NDF2_HUMAN
NLRKVVPCYSKTQKLS

SEQ ID NO: 27055 - protein, 16 aa, Homo sapiens
  ( 144 )...( 159 ): >NDF2_HUMAN
LRKVVPCYSKTQKLSK

SEQ ID NO: 27056 - protein, 16 aa, Homo sapiens
  ( 145 )...( 160 ): >NDF2_HUMAN
RKVVPCYSKTQKLSKI

SEQ ID NO: 27057 - protein, 16 aa, Homo sapiens
  ( 152 )...( 167 ): >NDF2_HUMAN
SKTQKLSKIETLRLAK

SEQ ID NO: 27058 - protein, 16 aa, Homo sapiens
  ( 153 )...( 168 ): >NDF2_HUMAN
KTQKLSKIETLRLAKN

SEQ ID NO: 27059 - protein, 16 aa, Homo sapiens
  ( 155 )...( 170 ): >NDF2_HUMAN
QKLSKIETLRLAKNYI

SEQ ID NO: 27060 - protein, 16 aa, Homo sapiens
  ( 110 )...( 125 ): >NDF4_HUMAN
LRRVMPCYSKTQKLSK

SEQ ID NO: 27061 - protein, 16 aa, Homo sapiens
  ( 111 )...( 126 ): >NDF4_HUMAN
RRVMPCYSKTQKLSKI

SEQ ID NO: 27062 - protein, 16 aa, Homo sapiens
  ( 118 )...( 133 ): >NDF4_HUMAN
SKTQKLSKIETLRLAR

SEQ ID NO: 27063 - protein, 16 aa, Homo sapiens
  ( 119 )...( 134 ): >NDF4_HUMAN
KTQKLSKIETLRLARN

SEQ ID NO: 27064 - protein, 16 aa, Homo sapiens
  ( 120 )...( 135 ): >NDF4_HUMAN
TQKLSKIETLRLARNY

SEQ ID NO: 27065 - protein, 16 aa, Homo sapiens
  ( 121 )...( 136 ): >NDF4_HUMAN
QKLSKIETLRLARNYI

SEQ ID NO: 27066 - protein, 16 aa, Homo sapiens
  ( 29 )...( 44 ): >NDF6_HUMAN
KQIKKPESFSKQIVLR

SEQ ID NO: 27067 - protein, 16 aa, Homo sapiens
  ( 30 )...( 45 ): >NDF6_HUMAN
QIKKPESFSKQIVLRG

SEQ ID NO: 27068 - protein, 16 aa, Homo sapiens
  ( 31 )...( 46 ): >NDF6_HUMAN
IKKPESFSKQIVLRGK

SEQ ID NO: 27069 - protein, 16 aa, Homo sapiens
  ( 32 )...( 47 ): >NDF6_HUMAN
KKPESFSKQIVLRGKS

SEQ ID NO: 27070 - protein, 16 aa, Homo sapiens
  ( 35 )...( 50 ): >NDF6_HUMAN
ESFSKQIVLRGKSIKR

SEQ ID NO: 27071 - protein, 16 aa, Homo sapiens
  ( 36 )...( 51 ): >NDF6_HUMAN
SFSKQIVLRGKSIKRA

SEQ ID NO: 27072 - protein, 16 aa, Homo sapiens
  ( 37 )...( 52 ): >NDF6_HUMAN
FSKQIVLRGKSIKRAP

SEQ ID NO: 27073 - protein, 16 aa, Homo sapiens
  ( 38 )...( 53 ): >NDF6_HUMAN
SKQIVLRGKSIKRAPG

SEQ ID NO: 27074 - protein, 16 aa, Homo sapiens
  ( 39 )...( 54 ): >NDF6_HUMAN
KQIVLRGKSIKRAPGE

SEQ ID NO: 27075 - protein, 16 aa, Homo sapiens
  ( 70 )...( 85 ): >NDF6_HUMAN
ENGLPRRRGLRKKKTT

SEQ ID NO: 27076 - protein, 16 aa, Homo sapiens
  ( 78 )...( 93 ): >NDF6_HUMAN
GLRKKKTTKLRLERVK

SEQ ID NO: 27077 - protein, 16 aa, Homo sapiens
  ( 114 )...( 129 ): >NDF6_HUMAN
LDNLRKVVPCYSKTQK

SEQ ID NO: 27078 - protein, 16 aa, Homo sapiens
  ( 115 )...( 130 ): >NDF6_HUMAN
DNLRKVVPCYSKTQKL

SEQ ID NO: 27079 - protein, 16 aa, Homo sapiens
  ( 116 )...( 131 ): >NDF6_HUMAN
NLRKVVPCYSKTQKLS

SEQ ID NO: 27080 - protein, 16 aa, Homo sapiens
  ( 117 )...( 132 ): >NDF6_HUMAN
LRKVVPCYSKTQKLSK

SEQ ID NO: 27081 - protein, 16 aa, Homo sapiens
  ( 118 )...( 133 ): >NDF6_HUMAN
RKVVPCYSKTQKLSKI

SEQ ID NO: 27082 - protein, 16 aa, Homo sapiens
  ( 125 )...( 140 ): >NDF6_HUMAN
SKTQKLSKIETLRLAK

SEQ ID NO: 27083 - protein, 16 aa, Homo sapiens
  ( 126 )...( 141 ): >NDF6_HUMAN
KTQKLSKIETLRLAKN

SEQ ID NO: 27084 - protein, 16 aa, Homo sapiens
  ( 128 )...( 143 ): >NDF6_HUMAN
QKLSKIETLRLAKNYI

SEQ ID NO: 27085 - protein, 16 aa, Homo sapiens
  ( 140 )...( 155 ): >NDF6_HUMAN
KNYIWALSEILRIGKR

SEQ ID NO: 27086 - protein, 16 aa, Homo sapiens
  ( 125 )...( 140 ): >NECD_HUMAN
VKDVIGSYKKWCRSIL

SEQ ID NO: 27087 - protein, 16 aa, Homo sapiens
  ( 126 )...( 141 ): >NECD_HUMAN
KDVIGSYKKWCRSILR

SEQ ID NO: 27088 - protein, 16 aa, Homo sapiens
  ( 128 )...( 143 ): >NECD_HUMAN
VIGSYKKWCRSILRRT

SEQ ID NO: 27089 - protein, 16 aa, Homo sapiens
  ( 129 )...( 144 ): >NECD_HUMAN
IGSYKKWCRSILRRTS

SEQ ID NO: 27090 - protein, 16 aa, Homo sapiens
  ( 133 )...( 148 ): >NECD_HUMAN
KKWCRSILRRTSLILA

SEQ ID NO: 27091 - protein, 16 aa, Homo sapiens
  ( 134 )...( 149 ): >NECD_HUMAN
KWCRSILRRTSLILAR

SEQ ID NO: 27092 - protein, 16 aa, Homo sapiens
  ( 135 )...( 150 ): >NECD_HUMAN
WCRSILRRTSLILARV

SEQ ID NO: 27093 - protein, 16 aa, Homo sapiens
  ( 136 )...( 151 ): >NECD_HUMAN
CRSILRRTSLILARVF

SEQ ID NO: 27094 - protein, 16 aa, Homo sapiens
  ( 137 )...( 152 ): >NECD_HUMAN
RSILRRTSLILARVFG

SEQ ID NO: 27095 - protein, 16 aa, Homo sapiens
  ( 138 )...( 153 ): >NECD_HUMAN
SILRRTSLILARVFGL

SEQ ID NO: 27096 - protein, 16 aa, Homo sapiens
  ( 139 )...( 154 ): >NECD_HUMAN
ILRRTSLILARVFGLH

SEQ ID NO: 27097 - protein, 16 aa, Homo sapiens
  ( 140 )...( 155 ): >NECD_HUMAN
LRRTSLILARVFGLHL

SEQ ID NO: 27098 - protein, 16 aa, Homo sapiens
  ( 141 )...( 156 ): >NECD_HUMAN
RRTSLILARVFGLHLR

SEQ ID NO: 27099 - protein, 16 aa, Homo sapiens
  ( 142 )...( 157 ): >NECD_HUMAN
RTSLILARVFGLHLRL

SEQ ID NO: 27100 - protein, 16 aa, Homo sapiens
  ( 191 )...( 206 ): >NECD_HUMAN
LLMILSLIYVKGRGAR

SEQ ID NO: 27101 - protein, 16 aa, Homo sapiens
  ( 200 )...( 215 ): >NECD_HUMAN
VKGRGARESAVWNVLR

SEQ ID NO: 27102 - protein, 16 aa, Homo sapiens
  ( 201 )...( 216 ): >NECD_HUMAN
KGRGARESAVWNVLRI

SEQ ID NO: 27103 - protein, 16 aa, Homo sapiens
  ( 208 )...( 223 ): >NECD_HUMAN
SAVWNVLRILGLRPWK

SEQ ID NO: 27104 - protein, 16 aa, Homo sapiens
  ( 209 )...( 224 ): >NECD_HUMAN
AVWNVLRILGLRPWKK

SEQ ID NO: 27105 - protein, 16 aa, Homo sapiens
  ( 212 )...( 227 ): >NECD_HUMAN
NVLRILGLRPWKKHST

SEQ ID NO: 27106 - protein, 16 aa, Homo sapiens
  ( 213 )...( 228 ): >NECD_HUMAN
VLRILGLRPWKKHSTF

SEQ ID NO: 27107 - protein, 16 aa, Homo sapiens
  ( 214 )...( 229 ): >NECD_HUMAN
LRILGLRPWKKHSTFG

SEQ ID NO: 27108 - protein, 16 aa, Homo sapiens
  ( 217 )...( 232 ): >NECD_HUMAN
LGLRPWKKHSTFGDVR

SEQ ID NO: 27109 - protein, 16 aa, Homo sapiens
  ( 270 )...( 285 ): >NECD_HUMAN
ITKMQIMEFLARVFKK

SEQ ID NO: 27110 - protein, 16 aa, Homo sapiens
  ( 79 )...( 94 ): >NFL1_HUMAN
TARRLLSQVRALDRFQ

SEQ ID NO: 27111 - protein, 16 aa, Homo sapiens
  ( 80 )...( 95 ): >NFL1_HUMAN
ARRLLSQVRALDRFQV

SEQ ID NO: 27112 - protein, 16 aa, Homo sapiens
  ( 648 )...( 663 ): >NFL1_HUMAN
SEAQLSLIRDIRRRGK

SEQ ID NO: 27113 - protein, 16 aa, Homo sapiens
  ( 653 )...( 668 ): >NFL1_HUMAN
SLIRDIRRRGKNKMAA

SEQ ID NO: 27114 - protein, 16 aa, Homo sapiens
  ( 665 )...( 680 ): >NFL1_HUMAN
KMAAQNCRKRKLDTIL

SEQ ID NO: 27115 - protein, 16 aa, Homo sapiens
  ( 666 )...( 681 ): >NFL1_HUMAN
MAAQNCRKRKLDTILN

SEQ ID NO: 27116 - protein, 16 aa, Homo sapiens
  ( 667 )...( 682 ): >NFL1_HUMAN
AAQNCRKRKLDTILNL

SEQ ID NO: 27117 - protein, 16 aa, Homo sapiens
  ( 711 )...( 726 ): >NFL1_HUMAN
KQKVQSLYQEVFGRLR

SEQ ID NO: 27118 - protein, 16 aa, Homo sapiens
  ( 291 )...( 306 ): >NFT5_HUMAN
QHRARYLTEGSRGSVK

SEQ ID NO: 27119 - protein, 16 aa, Homo sapiens
  ( 293 )...( 308 ): >NFT5_HUMAN
RARYLTEGSRGSVKDR

SEQ ID NO: 27120 - protein, 16 aa, Homo sapiens
  ( 302 )...( 317 ): >NFT5_HUMAN
RGSVKDRTQQGFPTVK

SEQ ID NO: 27121 - protein, 16 aa, Homo sapiens
  ( 337 )...( 352 ): >NFT5_HUMAN
RVKPHGFYQACRVTGR

SEQ ID NO: 27122 - protein, 16 aa, Homo sapiens
  ( 395 )...( 410 ): >NFT5_HUMAN
VEARIGIAGSKKKSTR

SEQ ID NO: 27123 - protein, 16 aa, Homo sapiens
  ( 396 )...( 411 ): >NFT5_HUMAN
EARIGIAGSKKKSTRA

SEQ ID NO: 27124 - protein, 16 aa, Homo sapiens
  ( 397 )...( 412 ): >NFT5_HUMAN
ARIGIAGSKKKSTRAR

SEQ ID NO: 27125 - protein, 16 aa, Homo sapiens
  ( 398 )...( 413 ): >NFT5_HUMAN
RIGIAGSKKKSTRARL

SEQ ID NO: 27126 - protein, 16 aa, Homo sapiens
  ( 399 )...( 414 ): >NFT5_HUMAN
IGIAGSKKKSTRARLV

SEQ ID NO: 27127 - protein, 16 aa, Homo sapiens
  ( 400 )...( 415 ): >NFT5_HUMAN
GIAGSKKKSTRARLVF

SEQ ID NO: 27128 - protein, 16 aa, Homo sapiens
  ( 401 )...( 416 ): >NFT5_HUMAN
IAGSKKKSTRARLVFR

SEQ ID NO: 27129 - protein, 16 aa, Homo sapiens
  ( 402 )...( 417 ): >NFT5_HUMAN
AGSKKKSTRARLVFRV

SEQ ID NO: 27130 - protein, 16 aa, Homo sapiens
  ( 403 )...( 418 ): >NFT5_HUMAN
GSKKKSTRARLVFRVN

SEQ ID NO: 27131 - protein, 16 aa, Homo sapiens
  ( 404 )...( 419 ): >NFT5_HUMAN
SKKKSTRARLVFRVNI

SEQ ID NO: 27132 - protein, 16 aa, Homo sapiens
  ( 405 )...( 420 ): >NFT5_HUMAN
KKKSTRARLVFRVNIM

SEQ ID NO: 27133 - protein, 16 aa, Homo sapiens
  ( 409 )...( 424 ): >NFT5_HUMAN
TRARLVFRVNIMRKDG

SEQ ID NO: 27134 - protein, 16 aa, Homo sapiens
  ( 410 )...( 425 ): >NFT5_HUMAN
RARLVFRVNIMRKDGS

SEQ ID NO: 27135 - protein, 16 aa, Homo sapiens
  ( 411 )...( 426 ): >NFT5_HUMAN
ARLVFRVNIMRKDGST

SEQ ID NO: 27136 - protein, 16 aa, Homo sapiens
  ( 412 )...( 427 ): >NFT5_HUMAN
RLVFRVNIMRKDGSTL

SEQ ID NO: 27137 - protein, 16 aa, Homo sapiens
  ( 464 )...( 479 ): >NFT5_HUMAN
FLIGKNFLKGTKVIFQ

SEQ ID NO: 27138 - protein, 16 aa, Homo sapiens
  ( 74 )...( 89 ): >NGN1_HUMAN
RRGRTRVRSEALLHSL

SEQ ID NO: 27139 - protein, 16 aa, Homo sapiens
  ( 75 )...( 90 ): >NGN1_HUMAN
RGRTRVRSEALLHSLR

SEQ ID NO: 27140 - protein, 16 aa, Homo sapiens
  ( 76 )...( 91 ): >NGN1_HUMAN
GRTRVRSEALLHSLRR

SEQ ID NO: 27141 - protein, 16 aa, Homo sapiens
  ( 80 )...( 95 ): >NGN1_HUMAN
VRSEALLHSLRRSRRV

SEQ ID NO: 27142 - protein, 16 aa, Homo sapiens
  ( 82 )...( 97 ): >NGN1_HUMAN
SEALLHSLRRSRRVKA

SEQ ID NO: 27143 - protein, 16 aa, Homo sapiens
  ( 52 )...( 67 ): >NGN2_HUMAN
CRPARLLGLVHDCKRR

SEQ ID NO: 27144 - protein, 16 aa, Homo sapiens
  ( 53 )...( 68 ): >NGN2_HUMAN
RPARLLGLVHDCKRRP

SEQ ID NO: 27145 - protein, 16 aa, Homo sapiens
  ( 55 )...( 70 ): >NGN2_HUMAN
ARLLGLVHDCKRRPSR

SEQ ID NO: 27146 - protein, 16 aa, Homo sapiens
  ( 56 )...( 71 ): >NGN2_HUMAN
RLLGLVHDCKRRPSRA

SEQ ID NO: 27147 - protein, 16 aa, Homo sapiens
  ( 57 )...( 72 ): >NGN2_HUMAN
LLGLVHDCKRRPSRAR

SEQ ID NO: 27148 - protein, 16 aa, Homo sapiens
  ( 58 )...( 73 ): >NGN2_HUMAN
LGLVHDCKRRPSRARA

SEQ ID NO: 27149 - protein, 16 aa, Homo sapiens
  ( 59 )...( 74 ): >NGN2_HUMAN
GLVHDCKRRPSRARAV

SEQ ID NO: 27150 - protein, 16 aa, Homo sapiens
  ( 60 )...( 75 ): >NGN2_HUMAN
LVHDCKRRPSRARAVS

SEQ ID NO: 27151 - protein, 16 aa, Homo sapiens
  ( 63 )...( 78 ): >NGN2_HUMAN
DCKRRPSRARAVSRGA

SEQ ID NO: 27152 - protein, 16 aa, Homo sapiens
  ( 67 )...( 82 ): >NGN2_HUMAN
RPSRARAVSRGAKTAE

SEQ ID NO: 27153 - protein, 16 aa, Homo sapiens
  ( 70 )...( 85 ): >NGN2_HUMAN
RARAVSRGAKTAETVQ

SEQ ID NO: 27154 - protein, 16 aa, Homo sapiens
  ( 71 )...( 86 ): >NGN2_HUMAN
ARAVSRGAKTAETVQR

SEQ ID NO: 27155 - protein, 16 aa, Homo sapiens
  ( 72 )...( 87 ): >NGN2_HUMAN
RAVSRGAKTAETVQRI

SEQ ID NO: 27156 - protein, 16 aa, Homo sapiens
  ( 73 )...( 88 ): >NGN2_HUMAN
AVSRGAKTAETVQRIK

SEQ ID NO: 27157 - protein, 16 aa, Homo sapiens
  ( 74 )...( 89 ): >NGN2_HUMAN
VSRGAKTAETVQRIKK

SEQ ID NO: 27158 - protein, 16 aa, Homo sapiens
  ( 75 )...( 90 ): >NGN2_HUMAN
SRGAKTAETVQRIKKT

SEQ ID NO: 27159 - protein, 16 aa, Homo sapiens
  ( 76 )...( 91 ): >NGN2_HUMAN
RGAKTAETVQRIKKTR

SEQ ID NO: 27160 - protein, 16 aa, Homo sapiens
  ( 77 )...( 92 ): >NGN2_HUMAN
GAKTAETVQRIKKTRR

SEQ ID NO: 27161 - protein, 16 aa, Homo sapiens
  ( 78 )...( 93 ): >NGN2_HUMAN
AKTAETVQRIKKTRRL

SEQ ID NO: 27162 - protein, 16 aa, Homo sapiens
  ( 79 )...( 94 ): >NGN2_HUMAN
KTAETVQRIKKTRRLK

SEQ ID NO: 27163 - protein, 16 aa, Homo sapiens
  ( 80 )...( 95 ): >NGN2_HUMAN
TAETVQRIKKTRRLKA

SEQ ID NO: 27164 - protein, 16 aa, Homo sapiens
  ( 81 )...( 96 ): >NGN2_HUMAN
AETVQRIKKTRRLKAN

SEQ ID NO: 27165 - protein, 16 aa, Homo sapiens
  ( 49 )...( 64 ): >NGN3_HUMAN
AEEGGCRGAPRKLRAR

SEQ ID NO: 27166 - protein, 16 aa, Homo sapiens
  ( 50 )...( 65 ): >NGN3_HUMAN
EEGGCRGAPRKLRARR

SEQ ID NO: 27167 - protein, 16 aa, Homo sapiens
  ( 51 )...( 66 ): >NGN3_HUMAN
EGGCRGAPRKLRARRG

SEQ ID NO: 27168 - protein, 16 aa, Homo sapiens
  ( 61 )...( 76 ): >NGN3_HUMAN
LRARRGGRSRPKSELA

SEQ ID NO: 27169 - protein, 16 aa, Homo sapiens
  ( 62 )...( 77 ): >NGN3_HUMAN
RARRGGRSRPKSELAL

SEQ ID NO: 27170 - protein, 16 aa, Homo sapiens
  ( 63 )...( 78 ): >NGN3_HUMAN
ARRGGRSRPKSELALS

SEQ ID NO: 27171 - protein, 16 aa, Homo sapiens
  ( 64 )...( 79 ): >NGN3_HUMAN
RRGGRSRPKSELALSK

SEQ ID NO: 27172 - protein, 16 aa, Homo sapiens
  ( 65 )...( 80 ): >NGN3_HUMAN
RGGRSRPKSELALSKQ

SEQ ID NO: 27173 - protein, 16 aa, Homo sapiens
  ( 66 )...( 81 ): >NGN3_HUMAN
GGRSRPKSELALSKQR

SEQ ID NO: 27174 - protein, 16 aa, Homo sapiens
  ( 111 )...( 126 ): >NK23_HUMAN
PEVVRDRSQKSCQLKK

SEQ ID NO: 27175 - protein, 16 aa, Homo sapiens
  ( 112 )...( 127 ): >NK23_HUMAN
EVVRDRSQKSCQLKKS

SEQ ID NO: 27176 - protein, 16 aa, Homo sapiens
  ( 113 )...( 128 ): >NK23_HUMAN
VVRDRSQKSCQLKKSL

SEQ ID NO: 27177 - protein, 16 aa, Homo sapiens
  ( 114 )...( 129 ): >NK23_HUMAN
VRDRSQKSCQLKKSLE

SEQ ID NO: 27178 - protein, 16 aa, Homo sapiens
  ( 184 )...( 199 ): >NK23_HUMAN
SLKLTSTQVKIWFQNR

SEQ ID NO: 27179 - protein, 16 aa, Homo sapiens
  ( 221 )...( 236 ): >NK23_HUMAN
PPPRRVAVPVLVRDGK

SEQ ID NO: 27180 - protein, 16 aa, Homo sapiens
  ( 222 )...( 237 ): >NK23_HUMAN
PPRRVAVPVLVRDGKP

SEQ ID NO: 27181 - protein, 16 aa, Homo sapiens
  ( 224 )...( 239 ): >NK23_HUMAN
RRVAVPVLVRDGKPCV

SEQ ID NO: 27182 - protein, 16 aa, Homo sapiens
  ( 178 )...( 193 ): >NK24_HUMAN
PLHAAAAAAAPRRKRR

SEQ ID NO: 27183 - protein, 16 aa, Homo sapiens
  ( 179 )...( 194 ): >NK24_HUMAN
LHAAAAAAAPRRKRRV

SEQ ID NO: 27184 - protein, 16 aa, Homo sapiens
  ( 180 )...( 195 ): >NK24_HUMAN
HAAAAAAAPRRKRRVL

SEQ ID NO: 27185 - protein, 16 aa, Homo sapiens
  ( 181 )...( 196 ): >NK24_HUMAN
AAAAAAAPRRKRRVLF

SEQ ID NO: 27186 - protein, 16 aa, Homo sapiens
  ( 182 )...( 197 ): >NK24_HUMAN
AAAAAAPRRKRRVLFS

SEQ ID NO: 27187 - protein, 16 aa, Homo sapiens
  ( 183 )...( 198 ): >NK24_HUMAN
AAAAAPRRKRRVLFSQ

SEQ ID NO: 27188 - protein, 16 aa, Homo sapiens
  ( 184 )...( 199 ): >NK24_HUMAN
AAAAPRRKRRVLFSQA

SEQ ID NO: 27189 - protein, 16 aa, Homo sapiens
  ( 185 )...( 200 ): >NK24_HUMAN
AAAPRRKRRVLFSQAQ

SEQ ID NO: 27190 - protein, 16 aa, Homo sapiens
  ( 186 )...( 201 ): >NK24_HUMAN
AAPRRKRRVLFSQAQV

SEQ ID NO: 27191 - protein, 16 aa, Homo sapiens
  ( 111 )...( 126 ): >NK31_HUMAN
GALPRLPQTPKQPQKR

SEQ ID NO: 27192 - protein, 16 aa, Homo sapiens
  ( 122 )...( 137 ): >NK31_HUMAN
QPQKRSRAAFSHTQVI

SEQ ID NO: 27193 - protein, 16 aa, Homo sapiens
  ( 176 )...( 191 ): >NK31_HUMAN
RYKTKRKQLSSELGDL

SEQ ID NO: 27194 - protein, 16 aa, Homo sapiens
  ( 241 )...( 256 ): >NMI_HUMAN
IHLKKYQIFSGTSKRT

SEQ ID NO: 27195 - protein, 16 aa, Homo sapiens
  ( 242 )...( 257 ): >NMI_HUMAN
HLKKYQIFSGTSKRTV

SEQ ID NO: 27196 - protein, 16 aa, Homo sapiens
  ( 243 )...( 258 ): >NMI_HUMAN
LKKYQIFSGTSKRTVL

SEQ ID NO: 27197 - protein, 16 aa, Homo sapiens
  ( 244 )...( 259 ): >NMI_HUMAN
KKYQIFSGTSKRTVLL

SEQ ID NO: 27198 - protein, 16 aa, Homo sapiens
  ( 83 )...( 98 ): >NPA1_HUMAN
DKASIVRLSVTYLRLR

SEQ ID NO: 27199 - protein, 16 aa, Homo sapiens
  ( 84 )...( 99 ): >NPA1_HUMAN
KASIVRLSVTYLRLRR

SEQ ID NO: 27200 - protein, 16 aa, Homo sapiens
  ( 85 )...( 100 ): >NPA1_HUMAN
ASIVRLSVTYLRLRRF

SEQ ID NO: 27201 - protein, 16 aa, Homo sapiens
  ( 86 )...( 101 ): >NPA1_HUMAN
SIVRLSVTYLRLRRFA

SEQ ID NO: 27202 - protein, 16 aa, Homo sapiens
  ( 87 )...( 102 ): >NPA1_HUMAN
IVRLSVTYLRLRRFAA

SEQ ID NO: 27203 - protein, 16 aa, Homo sapiens
  ( 88 )...( 103 ): >NPA1_HUMAN
VRLSVTYLRLRRFAAL

SEQ ID NO: 27204 - protein, 16 aa, Homo sapiens
  ( 89 )...( 104 ): >NPA1_HUMAN
RLSVTYLRLRRFAALG

SEQ ID NO: 27205 - protein, 16 aa, Homo sapiens
  ( 90 )...( 105 ): >NPA1_HUMAN
LSVTYLRLRRFAALGA

SEQ ID NO: 27206 - protein, 16 aa, Homo sapiens
  ( 91 )...( 106 ): >NPA1_HUMAN
SVTYLRLRRFAALGAP

SEQ ID NO: 27207 - protein, 16 aa, Homo sapiens
  ( 92 )...( 107 ): >NPA1_HUMAN
VTYLRLRRFAALGAPP

SEQ ID NO: 27208 - protein, 16 aa, Homo sapiens
  ( 96 )...( 111 ): >NPA1_HUMAN
RLRRFAALGAPPWGLR

SEQ ID NO: 27209 - protein, 16 aa, Homo sapiens
  ( 242 )...( 257 ): >NPA1_HUMAN
VQERSFFVRMKSTLTK

SEQ ID NO: 27210 - protein, 16 aa, Homo sapiens
  ( 244 )...( 259 ): >NPA1_HUMAN
ERSFFVRMKSTLTKRG

SEQ ID NO: 27211 - protein, 16 aa, Homo sapiens
  ( 245 )...( 260 ): >NPA1_HUMAN
RSFFVRMKSTLTKRGL

SEQ ID NO: 27212 - protein, 16 aa, Homo sapiens
  ( 246 )...( 261 ): >NPA1_HUMAN
SFFVRMKSTLTKRGLH

SEQ ID NO: 27213 - protein, 16 aa, Homo sapiens
  ( 247 )...( 262 ): >NPA1_HUMAN
FFVRMKSTLTKRGLHV

SEQ ID NO: 27214 - protein, 16 aa, Homo sapiens
  ( 248 )...( 263 ): >NPA1_HUMAN
FVRMKSTLTKRGLHVK

SEQ ID NO: 27215 - protein, 16 aa, Homo sapiens
  ( 249 )...( 264 ): >NPA1_HUMAN
VRMKSTLTKRGLHVKA

SEQ ID NO: 27216 - protein, 16 aa, Homo sapiens
  ( 250 )...( 265 ): >NPA1_HUMAN
RMKSTLTKRGLHVKAS

SEQ ID NO: 27217 - protein, 16 aa, Homo sapiens
  ( 251 )...( 266 ): >NPA1_HUMAN
MKSTLTKRGLHVKASG

SEQ ID NO: 27218 - protein, 16 aa, Homo sapiens
  ( 252 )...( 267 ): >NPA1_HUMAN
KSTLTKRGLHVKASGY

SEQ ID NO: 27219 - protein, 16 aa, Homo sapiens
  ( 253 )...( 268 ): >NPA1_HUMAN
STLTKRGLHVKASGYK

SEQ ID NO: 27220 - protein, 16 aa, Homo sapiens
  ( 254 )...( 269 ): >NPA1_HUMAN
TLTKRGLHVKASGYKV

SEQ ID NO: 27221 - protein, 16 aa, Homo sapiens
  ( 255 )...( 270 ): >NPA1_HUMAN
LTKRGLHVKASGYKVI

SEQ ID NO: 27222 - protein, 16 aa, Homo sapiens
  ( 256 )...( 271 ): >NPA1_HUMAN
TKRGLHVKASGYKVIH

SEQ ID NO: 27223 - protein, 16 aa, Homo sapiens
  ( 257 )...( 272 ): >NPA1_HUMAN
KRGLHVKASGYKVIHV

SEQ ID NO: 27224 - protein, 16 aa, Homo sapiens
  ( 262 )...( 277 ): >NPA1_HUMAN
VKASGYKVIHVTGRLR

SEQ ID NO: 27225 - protein, 16 aa, Homo sapiens
  ( 263 )...( 278 ): >NPA1_HUMAN
KASGYKVIHVTGRLRA

SEQ ID NO: 27226 - protein, 16 aa, Homo sapiens
  ( 266 )...( 281 ): >NPA1_HUMAN
GYKVIHVTGRLRAHAL

SEQ ID NO: 27227 - protein, 16 aa, Homo sapiens
  ( 267 )...( 282 ): >NPA1_HUMAN
YKVIHVTGRLRAHALG

SEQ ID NO: 27228 - protein, 16 aa, Homo sapiens
  ( 268 )...( 283 ): >NPA1_HUMAN
KVIHVTGRLRAHALGL

SEQ ID NO: 27229 - protein, 16 aa, Homo sapiens
  ( 360 )...( 375 ): >NPA1_HUMAN
KGQVMTGYYRWLQRAG

SEQ ID NO: 27230 - protein, 16 aa, Homo sapiens
  ( 455 )...( 470 ): >NPA1_HUMAN
APQTQGKRIKVEPGPR

SEQ ID NO: 27231 - protein, 16 aa, Homo sapiens
  ( 458 )...( 473 ): >NPA1_HUMAN
TQGKRIKVEPGPRETK

SEQ ID NO: 27232 - protein, 16 aa, Homo sapiens
  ( 459 )...( 474 ): >NPA1_HUMAN
QGKRIKVEPGPRETKG

SEQ ID NO: 27233 - protein, 16 aa, Homo sapiens
  ( 460 )...( 475 ): >NPA1_HUMAN
GKRIKVEPGPRETKGS

SEQ ID NO: 27234 - protein, 16 aa, Homo sapiens
  ( 690 )...( 705 ): >NPA2_HUMAN
ARQPSEVSRTGRQVKY

SEQ ID NO: 27235 - protein, 16 aa, Homo sapiens
  ( 691 )...( 706 ): >NPA2_HUMAN
RQPSEVSRTGRQVKYA

SEQ ID NO: 27236 - protein, 16 aa, Homo sapiens
  ( 696 )...( 711 ): >NPA2_HUMAN
VSRTGRQVKYAQSQTV

SEQ ID NO: 27237 - protein, 16 aa, Homo sapiens
  ( 697 )...( 712 ): >NPA2_HUMAN
SRTGRQVKYAQSQTVF

SEQ ID NO: 27238 - protein, 16 aa, Homo sapiens
  ( 698 )...( 713 ): >NPA2_HUMAN
RTGRQVKYAQSQTVFQ

SEQ ID NO: 27239 - protein, 16 aa, Homo sapiens
  ( 65 )...( 80 ): >NR23_HUMAN
NGCSGFFKRSVRRRLI

SEQ ID NO: 27240 - protein, 16 aa, Homo sapiens
  ( 66 )...( 81 ): >NR23_HUMAN
GCSGFFKRSVRRRLIY

SEQ ID NO: 27241 - protein, 16 aa, Homo sapiens
  ( 73 )...( 88 ): >NR23_HUMAN
RSVRRRLIYRCQVGAG

SEQ ID NO: 27242 - protein, 16 aa, Homo sapiens
  ( 74 )...( 89 ): >NR23_HUMAN
SVRRRLIYRCQVGAGM

SEQ ID NO: 27243 - protein, 16 aa, Homo sapiens
  ( 75 )...( 90 ): >NR23_HUMAN
VRRRLIYRCQVGAGMC

SEQ ID NO: 27244 - protein, 16 aa, Homo sapiens
  ( 223 )...( 238 ): >NR23_HUMAN
TSARLLFMAVKWAKNL

SEQ ID NO: 27245 - protein, 16 aa, Homo sapiens
  ( 322 )...( 337 ): >NR23_HUMAN
CMKALVLFKPETRGLK

SEQ ID NO: 27246 - protein, 16 aa, Homo sapiens
  ( 142 )...( 157 ): >NR52_HUMAN
RFQKCLSVGMKLEAVR

SEQ ID NO: 27247 - protein, 16 aa, Homo sapiens
  ( 150 )...( 165 ): >NR52_HUMAN
GMKLEAVRADRMRGGR

SEQ ID NO: 27248 - protein, 16 aa, Homo sapiens
  ( 151 )...( 166 ): >NR52_HUMAN
MKLEAVRADRMRGGRN

SEQ ID NO: 27249 - protein, 16 aa, Homo sapiens
  ( 152 )...( 167 ): >NR52_HUMAN
KLEAVRADRMRGGRNK

SEQ ID NO: 27250 - protein, 16 aa, Homo sapiens
  ( 153 )...( 168 ): >NR52_HUMAN
LEAVRADRMRGGRNKF

SEQ ID NO: 27251 - protein, 16 aa, Homo sapiens
  ( 154 )...( 169 ): >NR52_HUMAN
EAVRADRMRGGRNKFG

SEQ ID NO: 27252 - protein, 16 aa, Homo sapiens
  ( 155 )...( 170 ): >NR52_HUMAN
AVRADRMRGGRNKFGP

SEQ ID NO: 27253 - protein, 16 aa, Homo sapiens
  ( 156 )...( 171 ): >NR52_HUMAN
VRADRMRGGRNKFGPM

SEQ ID NO: 27254 - protein, 16 aa, Homo sapiens
  ( 175 )...( 190 ): >NR52_HUMAN
DRALKQQKKALIRANG

SEQ ID NO: 27255 - protein, 16 aa, Homo sapiens
  ( 176 )...( 191 ): >NR52_HUMAN
RALKQQKKALIRANGL

SEQ ID NO: 27256 - protein, 16 aa, Homo sapiens
  ( 177 )...( 192 ): >NR52_HUMAN
ALKQQKKALIRANGLK

SEQ ID NO: 27257 - protein, 16 aa, Homo sapiens
  ( 178 )...( 193 ): >NR52_HUMAN
LKQQKKALIRANGLKL

SEQ ID NO: 27258 - protein, 16 aa, Homo sapiens
  ( 179 )...( 194 ): >NR52_HUMAN
KQQKKALIRANGLKLE

SEQ ID NO: 27259 - protein, 16 aa, Homo sapiens
  ( 180 )...( 195 ): >NR52_HUMAN
QQKKALIRANGLKLEA

SEQ ID NO: 27260 - protein, 16 aa, Homo sapiens
  ( 181 )...( 196 ): >NR52_HUMAN
QKKALIRANGLKLEAM

SEQ ID NO: 27261 - protein, 16 aa, Homo sapiens
  ( 182 )...( 197 ): >NR52_HUMAN
KKALIRANGLKLEAMS

SEQ ID NO: 27262 - protein, 16 aa, Homo sapiens
  ( 81 )...( 96 ): >NRF1_HUMAN
AAAAVATGKKRKRPHV

SEQ ID NO: 27263 - protein, 16 aa, Homo sapiens
  ( 82 )...( 97 ): >NRF1_HUMAN
AAAVATGKKRKRPHVF

SEQ ID NO: 27264 - protein, 16 aa, Homo sapiens
  ( 83 )...( 98 ): >NRF1_HUMAN
AAVATGKKRKRPHVFE

SEQ ID NO: 27265 - protein, 16 aa, Homo sapiens
  ( 84 )...( 99 ): >NRF1_HUMAN
AVATGKKRKRPHVFES

SEQ ID NO: 27266 - protein, 16 aa, Homo sapiens
  ( 85 )...( 100 ): >NRF1_HUMAN
VATGKKRKRPHVFESN

SEQ ID NO: 27267 - protein, 16 aa, Homo sapiens
  ( 145 )...( 160 ): >NRF1_HUMAN
KVFGAAPLENVVRKYK

SEQ ID NO: 27268 - protein, 16 aa, Homo sapiens
  ( 206 )...( 221 ): >NRF1_HUMAN
RAFIPEMLKYSTGRGK

SEQ ID NO: 27269 - protein, 16 aa, Homo sapiens
  ( 252 )...( 267 ): >NRF1_HUMAN
QKQRVSWTQALRTIVK

SEQ ID NO: 27270 - protein, 16 aa, Homo sapiens
  ( 253 )...( 268 ): >NRF1_HUMAN
KQRVSWTQALRTIVKN

SEQ ID NO: 27271 - protein, 16 aa, Homo sapiens
  ( 254 )...( 269 ): >NRF1_HUMAN
QRVSWTQALRTIVKNC

SEQ ID NO: 27272 - protein, 16 aa, Homo sapiens
  ( 255 )...( 270 ): >NRF1_HUMAN
RVSWTQALRTIVKNCY

SEQ ID NO: 27273 - protein, 16 aa, Homo sapiens
  ( 256 )...( 271 ): >NRF1_HUMAN
VSWTQALRTIVKNCYK

SEQ ID NO: 27274 - protein, 16 aa, Homo sapiens
  ( 257 )...( 272 ): >NRF1_HUMAN
SWTQALRTIVKNCYKQ

SEQ ID NO: 27275 - protein, 16 aa, Homo sapiens
  ( 260 )...( 275 ): >NRF1_HUMAN
QALRTIVKNCYKQHGR

SEQ ID NO: 27276 - protein, 16 aa, Homo sapiens
  ( 261 )...( 276 ): >NRF1_HUMAN
ALRTIVKNCYKQHGRE

SEQ ID NO: 27277 - protein, 16 aa, Homo sapiens
  ( 7 )...( 22 ): >OLG1_HUMAN
QARVNAVPGTMLRPQR

SEQ ID NO: 27278 - protein, 16 aa, Homo sapiens
  ( 8 )...( 23 ): >OLG1_HUMAN
ARVNAVPGTMLRPQRP

SEQ ID NO: 27279 - protein, 16 aa, Homo sapiens
  ( 9 )...( 24 ): >OLG1_HUMAN
RVNAVPGTMLRPQRPG

SEQ ID NO: 27280 - protein, 16 aa, Homo sapiens
  ( 143 )...( 158 ): >OLG1_HUMAN
APGRKLSKIATLLLAR

SEQ ID NO: 27281 - protein, 16 aa, Homo sapiens
  ( 144 )...( 159 ): >OLG1_HUMAN
PGRKLSKIATLLLARN

SEQ ID NO: 27282 - protein, 16 aa, Homo sapiens
  ( 145 )...( 160 ): >OLG1_HUMAN
GRKLSKIATLLLARNY

SEQ ID NO: 27283 - protein, 16 aa, Homo sapiens
  ( 146 )...( 161 ): >OLG1_HUMAN
RKLSKIATLLLARNYI

SEQ ID NO: 27284 - protein, 16 aa, Homo sapiens
  ( 147 )...( 162 ): >OLG1_HUMAN
KLSKIATLLLARNYIL

SEQ ID NO: 27285 - protein, 16 aa, Homo sapiens
  ( 141 )...( 156 ): >OLG2_HUMAN
PSVRKLSKIATLLLAR

SEQ ID NO: 27286 - protein, 16 aa, Homo sapiens
  ( 142 )...( 157 ): >OLG2_HUMAN
SVRKLSKIATLLLARN

SEQ ID NO: 27287 - protein, 16 aa, Homo sapiens
  ( 143 )...( 158 ): >OLG2_HUMAN
VRKLSKIATLLLARNY

SEQ ID NO: 27288 - protein, 16 aa, Homo sapiens
  ( 144 )...( 159 ): >OLG2_HUMAN
RKLSKIATLLLARNYI

SEQ ID NO: 27289 - protein, 16 aa, Homo sapiens
  ( 145 )...( 160 ): >OLG2_HUMAN
KLSKIATLLLARNYIL

SEQ ID NO: 27290 - protein, 16 aa, Homo sapiens
  ( 327 )...( 342 ): >ONC2_HUMAN
LKRYSIPQAIFAQRVL

SEQ ID NO: 27291 - protein, 16 aa, Homo sapiens
  ( 328 )...( 343 ): >ONC2_HUMAN
KRYSIPQAIFAQRVLC

SEQ ID NO: 27292 - protein, 16 aa, Homo sapiens
  ( 329 )...( 344 ): >ONC2_HUMAN
RYSIPQAIFAQRVLCR

SEQ ID NO: 27293 - protein, 16 aa, Homo sapiens
  ( 380 )...( 395 ): >ONC2_HUMAN
EFQRMSALRLAACKRK

SEQ ID NO: 27294 - protein, 16 aa, Homo sapiens
  ( 381 )...( 396 ): >ONC2_HUMAN
FQRMSALRLAACKRKE

SEQ ID NO: 27295 - protein, 16 aa, Homo sapiens
  ( 382 )...( 397 ): >ONC2_HUMAN
QRMSALRLAACKRKEQ

SEQ ID NO: 27296 - protein, 16 aa, Homo sapiens
  ( 383 )...( 398 ): >ONC2_HUMAN
RMSALRLAACKRKEQE

SEQ ID NO: 27297 - protein, 16 aa, Homo sapiens
  ( 386 )...( 401 ): >ONC2_HUMAN
ALRLAACKRKEQEPNK

SEQ ID NO: 27298 - protein, 16 aa, Homo sapiens
  ( 409 )...( 424 ): >ONC2_HUMAN
KSRLVFTDLQRRTLFA

SEQ ID NO: 27299 - protein, 16 aa, Homo sapiens
  ( 129 )...( 144 ): >OVO1_HUMAN
LKRHVRTHTGVRPYKC

SEQ ID NO: 27300 - protein, 16 aa, Homo sapiens
  ( 130 )...( 145 ): >OVO1_HUMAN
KRHVRTHTGVRPYKCS

SEQ ID NO: 27301 - protein, 16 aa, Homo sapiens
  ( 131 )...( 146 ): >OVO1_HUMAN
RHVRTHTGVRPYKCSL

SEQ ID NO: 27302 - protein, 16 aa, Homo sapiens
  ( 207 )...( 222 ): >OVO1_HUMAN
SPLLRKTSKKVAVALQ

SEQ ID NO: 27303 - protein, 16 aa, Homo sapiens
  ( 208 )...( 223 ): >OVO1_HUMAN
PLLRKTSKKVAVALQN

SEQ ID NO: 27304 - protein, 16 aa, Homo sapiens
  ( 209 )...( 224 ): >OVO1_HUMAN
LLRKTSKKVAVALQNT

SEQ ID NO: 27305 - protein, 16 aa, Homo sapiens
  ( 210 )...( 225 ): >OVO1_HUMAN
LRKTSKKVAVALQNTV

SEQ ID NO: 27306 - protein, 16 aa, Homo sapiens
  ( 211 )...( 226 ): >OVO1_HUMAN
RKTSKKVAVALQNTVT

SEQ ID NO: 27307 - protein, 16 aa, Homo sapiens
  ( 53 )...( 68 ): >PAS1_HUMAN
KASIMRLAISFLRTHK

SEQ ID NO: 27308 - protein, 16 aa, Homo sapiens
  ( 54 )...( 69 ): >PAS1_HUMAN
ASIMRLAISFLRTHKL

SEQ ID NO: 27309 - protein, 16 aa, Homo sapiens
  ( 55 )...( 70 ): >PAS1_HUMAN
SIMRLAISFLRTHKLL

SEQ ID NO: 27310 - protein, 16 aa, Homo sapiens
  ( 56 )...( 71 ): >PAS1_HUMAN
IMRLAISFLRTHKLLS

SEQ ID NO: 27311 - protein, 16 aa, Homo sapiens
  ( 143 )...( 158 ): >PAS1_HUMAN
IRENLSLKNGSGFGKK

SEQ ID NO: 27312 - protein, 16 aa, Homo sapiens
  ( 168 )...( 183 ): >PAS1_HUMAN
FFMRMKCTVTNRGRTV

SEQ ID NO: 27313 - protein, 16 aa, Homo sapiens
  ( 169 )...( 184 ): >PAS1_HUMAN
FMRMKCTVTNRGRTVN

SEQ ID NO: 27314 - protein, 16 aa, Homo sapiens
  ( 170 )...( 185 ): >PAS1_HUMAN
MRMKCTVTNRGRTVNL

SEQ ID NO: 27315 - protein, 16 aa, Homo sapiens
  ( 171 )...( 186 ): >PAS1_HUMAN
RMKCTVTNRGRTVNLK

SEQ ID NO: 27316 - protein, 16 aa, Homo sapiens
  ( 172 )...( 187 ): >PAS1_HUMAN
MKCTVTNRGRTVNLKS

SEQ ID NO: 27317 - protein, 16 aa, Homo sapiens
  ( 173 )...( 188 ): >PAS1_HUMAN
KCTVTNRGRTVNLKSA

SEQ ID NO: 27318 - protein, 16 aa, Homo sapiens
  ( 174 )...( 189 ): >PAS1_HUMAN
CTVTNRGRTVNLKSAT

SEQ ID NO: 27319 - protein, 16 aa, Homo sapiens
  ( 175 )...( 190 ): >PAS1_HUMAN
TVTNRGRTVNLKSATW

SEQ ID NO: 27320 - protein, 16 aa, Homo sapiens
  ( 176 )...( 191 ): >PAS1_HUMAN
VTNRGRTVNLKSATWK

SEQ ID NO: 27321 - protein, 16 aa, Homo sapiens
  ( 177 )...( 192 ): >PAS1_HUMAN
TNRGRTVNLKSATWKV

SEQ ID NO: 27322 - protein, 16 aa, Homo sapiens
  ( 178 )...( 193 ): >PAS1_HUMAN
NRGRTVNLKSATWKVL

SEQ ID NO: 27323 - protein, 16 aa, Homo sapiens
  ( 179 )...( 194 ): >PAS1_HUMAN
RGRTVNLKSATWKVLH

SEQ ID NO: 27324 - protein, 16 aa, Homo sapiens
  ( 297 )...( 312 ): >PAS1_HUMAN
CTKGQVVSGQYRMLAK

SEQ ID NO: 27325 - protein, 16 aa, Homo sapiens
  ( 299 )...( 314 ): >PAS1_HUMAN
KGQVVSGQYRMLAKHG

SEQ ID NO: 27326 - protein, 16 aa, Homo sapiens
  ( 675 )...( 690 ): >PAS1_HUMAN
HVSTFKTRSAKGFGAR

SEQ ID NO: 27327 - protein, 16 aa, Homo sapiens
  ( 676 )...( 691 ): >PAS1_HUMAN
VSTFKTRSAKGFGARG

SEQ ID NO: 27328 - protein, 16 aa, Homo sapiens
  ( 695 )...( 710 ): >PAS1_HUMAN
LSPAMVALSNKLKLKR

SEQ ID NO: 27329 - protein, 16 aa, Homo sapiens
  ( 696 )...( 711 ): >PAS1_HUMAN
SPAMVALSNKLKLKRQ

SEQ ID NO: 27330 - protein, 16 aa, Homo sapiens
  ( 697 )...( 712 ): >PAS1_HUMAN
PAMVALSNKLKLKRQL

SEQ ID NO: 27331 - protein, 16 aa, Homo sapiens
  ( 698 )...( 713 ): >PAS1_HUMAN
AMVALSNKLKLKRQLE

SEQ ID NO: 27332 - protein, 16 aa, Homo sapiens
  ( 699 )...( 714 ): >PAS1_HUMAN
MVALSNKLKLKRQLEY

SEQ ID NO: 27333 - protein, 16 aa, Homo sapiens
  ( 729 )...( 744 ): >PAS1_HUMAN
GGSTSHLMWKRMKNLR

SEQ ID NO: 27334 - protein, 16 aa, Homo sapiens
  ( 730 )...( 745 ): >PAS1_HUMAN
GSTSHLMWKRMKNLRG

SEQ ID NO: 27335 - protein, 16 aa, Homo sapiens
  ( 731 )...( 746 ): >PAS1_HUMAN
STSHLMWKRMKNLRGG

SEQ ID NO: 27336 - protein, 16 aa, Homo sapiens
  ( 732 )...( 747 ): >PAS1_HUMAN
TSHLMWKRMKNLRGGS

SEQ ID NO: 27337 - protein, 16 aa, Homo sapiens
  ( 54 )...( 69 ): >PAX2_HUMAN
ISRQLRVSHGCVSKIL

SEQ ID NO: 27338 - protein, 16 aa, Homo sapiens
  ( 55 )...( 70 ): >PAX2_HUMAN
SRQLRVSHGCVSKILG

SEQ ID NO: 27339 - protein, 16 aa, Homo sapiens
  ( 56 )...( 71 ): >PAX2_HUMAN
RQLRVSHGCVSKILGR

SEQ ID NO: 27340 - protein, 16 aa, Homo sapiens
  ( 57 )...( 72 ): >PAX2_HUMAN
QLRVSHGCVSKILGRY

SEQ ID NO: 27341 - protein, 16 aa, Homo sapiens
  ( 58 )...( 73 ): >PAX2_HUMAN
LRVSHGCVSKILGRYY

SEQ ID NO: 27342 - protein, 16 aa, Homo sapiens
  ( 89 )...( 104 ): >PAX2_HUMAN
KVATPKVVDKIAEYKR

SEQ ID NO: 27343 - protein, 16 aa, Homo sapiens
  ( 128 )...( 143 ): >PAX2_HUMAN
TVPSVSSINRIIRTKV

SEQ ID NO: 27344 - protein, 16 aa, Homo sapiens
  ( 129 )...( 144 ): >PAX2_HUMAN
VPSVSSINRIIRTKVQ

SEQ ID NO: 27345 - protein, 16 aa, Homo sapiens
  ( 130 )...( 145 ): >PAX2_HUMAN
PSVSSINRIIRTKVQQ

SEQ ID NO: 27346 - protein, 16 aa, Homo sapiens
  ( 131 )...( 146 ): >PAX2_HUMAN
SVSSINRIIRTKVQQP

SEQ ID NO: 27347 - protein, 16 aa, Homo sapiens
  ( 132 )...( 147 ): >PAX2_HUMAN
VSSINRIIRTKVQQPF

SEQ ID NO: 27348 - protein, 16 aa, Homo sapiens
  ( 187 )...( 202 ): >PAX2_HUMAN
INGILGIPRSNGEKRK

SEQ ID NO: 27349 - protein, 16 aa, Homo sapiens
  ( 188 )...( 203 ): >PAX2_HUMAN
NGILGIPRSNGEKRKR

SEQ ID NO: 27350 - protein, 16 aa, Homo sapiens
  ( 189 )...( 204 ): >PAX2_HUMAN
GILGIPRSNGEKRKRD

SEQ ID NO: 27351 - protein, 16 aa, Homo sapiens
  ( 62 )...( 77 ): >PAX3_HUMAN
MAHHGIRPCVISRQLR

SEQ ID NO: 27352 - protein, 16 aa, Homo sapiens
  ( 63 )...( 78 ): >PAX3_HUMAN
AHHGIRPCVISRQLRV

SEQ ID NO: 27353 - protein, 16 aa, Homo sapiens
  ( 64 )...( 79 ): >PAX3_HUMAN
HHGIRPCVISRQLRVS

SEQ ID NO: 27354 - protein, 16 aa, Homo sapiens
  ( 65 )...( 80 ): >PAX3_HUMAN
HGIRPCVISRQLRVSH

SEQ ID NO: 27355 - protein, 16 aa, Homo sapiens
  ( 66 )...( 81 ): >PAX3_HUMAN
GIRPCVISRQLRVSHG

SEQ ID NO: 27356 - protein, 16 aa, Homo sapiens
  ( 71 )...( 86 ): >PAX3_HUMAN
VISRQLRVSHGCVSKI

SEQ ID NO: 27357 - protein, 16 aa, Homo sapiens
  ( 72 )...( 87 ): >PAX3_HUMAN
ISRQLRVSHGCVSKIL

SEQ ID NO: 27358 - protein, 16 aa, Homo sapiens
  ( 74 )...( 89 ): >PAX3_HUMAN
RQLRVSHGCVSKILCR

SEQ ID NO: 27359 - protein, 16 aa, Homo sapiens
  ( 145 )...( 160 ): >PAX3_HUMAN
RNTVPSVSSISRILRS

SEQ ID NO: 27360 - protein, 16 aa, Homo sapiens
  ( 149 )...( 164 ): >PAX3_HUMAN
PSVSSISRILRSKFGK

SEQ ID NO: 27361 - protein, 16 aa, Homo sapiens
  ( 150 )...( 165 ): >PAX3_HUMAN
SVSSISRILRSKFGKG

SEQ ID NO: 27362 - protein, 16 aa, Homo sapiens
  ( 151 )...( 166 ): >PAX3_HUMAN
VSSISRILRSKFGKGE

SEQ ID NO: 27363 - protein, 16 aa, Homo sapiens
  ( 44 )...( 59 ): >PAX6_HUMAN
RILQVSNGCVSKILGR

SEQ ID NO: 27364 - protein, 16 aa, Homo sapiens
  ( 54 )...( 69 ): >PAX6_HUMAN
SKILGRYYETGSIRPR

SEQ ID NO: 27365 - protein, 16 aa, Homo sapiens
  ( 55 )...( 70 ): >PAX6_HUMAN
KILGRYYETGSIRPRA

SEQ ID NO: 27366 - protein, 16 aa, Homo sapiens
  ( 62 )...( 77 ): >PAX6_HUMAN
ETGSIRPRAIGGSKPR

SEQ ID NO: 27367 - protein, 16 aa, Homo sapiens
  ( 65 )...( 80 ): >PAX6_HUMAN
SIRPRAIGGSKPRVAT

SEQ ID NO: 27368 - protein, 16 aa, Homo sapiens
  ( 66 )...( 81 ): >PAX6_HUMAN
IRPRAIGGSKPRVATP

SEQ ID NO: 27369 - protein, 16 aa, Homo sapiens
  ( 67 )...( 82 ): >PAX6_HUMAN
RPRAIGGSKPRVATPE

SEQ ID NO: 27370 - protein, 16 aa, Homo sapiens
  ( 77 )...( 92 ): >PAX6_HUMAN
RVATPEVVSKIAQYKR

SEQ ID NO: 27371 - protein, 16 aa, Homo sapiens
  ( 145 )...( 160 ): >PAX6_HUMAN
KLRMLNGQTGSWGTRP

SEQ ID NO: 27372 - protein, 16 aa, Homo sapiens
  ( 62 )...( 77 ): >PAX7_HUMAN
MAHHGIRPCVISRQLR

SEQ ID NO: 27373 - protein, 16 aa, Homo sapiens
  ( 63 )...( 78 ): >PAX7_HUMAN
AHHGIRPCVISRQLRV

SEQ ID NO: 27374 - protein, 16 aa, Homo sapiens
  ( 64 )...( 79 ): >PAX7_HUMAN
HHGIRPCVISRQLRVS

SEQ ID NO: 27375 - protein, 16 aa, Homo sapiens
  ( 65 )...( 80 ): >PAX7_HUMAN
HGIRPCVISRQLRVSH

SEQ ID NO: 27376 - protein, 16 aa, Homo sapiens
  ( 66 )...( 81 ): >PAX7_HUMAN
GIRPCVISRQLRVSHG

SEQ ID NO: 27377 - protein, 16 aa, Homo sapiens
  ( 71 )...( 86 ): >PAX7_HUMAN
VISRQLRVSHGCVSKI

SEQ ID NO: 27378 - protein, 16 aa, Homo sapiens
  ( 72 )...( 87 ): >PAX7_HUMAN
ISRQLRVSHGCVSKIL

SEQ ID NO: 27379 - protein, 16 aa, Homo sapiens
  ( 74 )...( 89 ): >PAX7_HUMAN
RQLRVSHGCVSKILCR

SEQ ID NO: 27380 - protein, 16 aa, Homo sapiens
  ( 148 )...( 163 ): >PAX7_HUMAN
VPSGLVSSISRVLRIK

SEQ ID NO: 27381 - protein, 16 aa, Homo sapiens
  ( 149 )...( 164 ): >PAX7_HUMAN
PSGLVSSISRVLRIKF

SEQ ID NO: 27382 - protein, 16 aa, Homo sapiens
  ( 150 )...( 165 ): >PAX7_HUMAN
SGLVSSISRVLRIKFG

SEQ ID NO: 27383 - protein, 16 aa, Homo sapiens
  ( 151 )...( 166 ): >PAX7_HUMAN
GLVSSISRVLRIKFGK

SEQ ID NO: 27384 - protein, 16 aa, Homo sapiens
  ( 152 )...( 167 ): >PAX7_HUMAN
LVSSISRVLRIKFGKK

SEQ ID NO: 27385 - protein, 16 aa, Homo sapiens
  ( 153 )...( 168 ): >PAX7_HUMAN
VSSISRVLRIKFGKKE

SEQ ID NO: 27386 - protein, 16 aa, Homo sapiens
  ( 154 )...( 169 ): >PAX7_HUMAN
SSISRVLRIKFGKKEE

SEQ ID NO: 27387 - protein, 16 aa, Homo sapiens
  ( 269 )...( 284 ): >PAX7_HUMAN
RARWRKQAGANQLAAF

SEQ ID NO: 27388 - protein, 16 aa, Homo sapiens
  ( 47 )...( 62 ): >PAX8_HUMAN
ISRQLRVSHGCVSKIL

SEQ ID NO: 27389 - protein, 16 aa, Homo sapiens
  ( 48 )...( 63 ): >PAX8_HUMAN
SRQLRVSHGCVSKILG

SEQ ID NO: 27390 - protein, 16 aa, Homo sapiens
  ( 49 )...( 64 ): >PAX8_HUMAN
RQLRVSHGCVSKILGR

SEQ ID NO: 27391 - protein, 16 aa, Homo sapiens
  ( 50 )...( 65 ): >PAX8_HUMAN
QLRVSHGCVSKILGRY

SEQ ID NO: 27392 - protein, 16 aa, Homo sapiens
  ( 51 )...( 66 ): >PAX8_HUMAN
LRVSHGCVSKILGRYY

SEQ ID NO: 27393 - protein, 16 aa, Homo sapiens
  ( 82 )...( 97 ): >PAX8_HUMAN
KVATPKVVEKIGDYKR

SEQ ID NO: 27394 - protein, 16 aa, Homo sapiens
  ( 121 )...( 136 ): >PAX8_HUMAN
TVPSVSSINRIIRTKV

SEQ ID NO: 27395 - protein, 16 aa, Homo sapiens
  ( 122 )...( 137 ): >PAX8_HUMAN
VPSVSSINRIIRTKVQ

SEQ ID NO: 27396 - protein, 16 aa, Homo sapiens
  ( 123 )...( 138 ): >PAX8_HUMAN
PSVSSINRIIRTKVQQ

SEQ ID NO: 27397 - protein, 16 aa, Homo sapiens
  ( 124 )...( 139 ): >PAX8_HUMAN
SVSSINRIIRTKVQQP

SEQ ID NO: 27398 - protein, 16 aa, Homo sapiens
  ( 125 )...( 140 ): >PAX8_HUMAN
VSSINRIIRTKVQQPF

SEQ ID NO: 27399 - protein, 16 aa, Homo sapiens
  ( 127 )...( 142 ): >PAX8_HUMAN
SINRIIRTKVQQPFNL

SEQ ID NO: 27400 - protein, 16 aa, Homo sapiens
  ( 13 )...( 28 ): >PAX9_HUMAN
GVFVNGRPLPNAIRLR

SEQ ID NO: 27401 - protein, 16 aa, Homo sapiens
  ( 14 )...( 29 ): >PAX9_HUMAN
VFVNGRPLPNAIRLRI

SEQ ID NO: 27402 - protein, 16 aa, Homo sapiens
  ( 15 )...( 30 ): >PAX9_HUMAN
FVNGRPLPNAIRLRIV

SEQ ID NO: 27403 - protein, 16 aa, Homo sapiens
  ( 42 )...( 57 ): >PAX9_HUMAN
ISRQLRVSHGCVSKIL

SEQ ID NO: 27404 - protein, 16 aa, Homo sapiens
  ( 43 )...( 58 ): >PAX9_HUMAN
SRQLRVSHGCVSKILA

SEQ ID NO: 27405 - protein, 16 aa, Homo sapiens
  ( 44 )...( 59 ): >PAX9_HUMAN
RQLRVSHGCVSKILAR

SEQ ID NO: 27406 - protein, 16 aa, Homo sapiens
  ( 45 )...( 60 ): >PAX9_HUMAN
QLRVSHGCVSKILARY

SEQ ID NO: 27407 - protein, 16 aa, Homo sapiens
  ( 73 )...( 88 ): >PAX9_HUMAN
GSKPRVTTPTVVKHIR

SEQ ID NO: 27408 - protein, 16 aa, Homo sapiens
  ( 74 )...( 89 ): >PAX9_HUMAN
SKPRVTTPTVVKHIRT

SEQ ID NO: 27409 - protein, 16 aa, Homo sapiens
  ( 75 )...( 90 ): >PAX9_HUMAN
KPRVTTPTVVKHIRTY

SEQ ID NO: 27410 - protein, 16 aa, Homo sapiens
  ( 76 )...( 91 ): >PAX9_HUMAN
PRVTTPTVVKHIRTYK

SEQ ID NO: 27411 - protein, 16 aa, Homo sapiens
  ( 77 )...( 92 ): >PAX9_HUMAN
RVTTPTVVKHIRTYKQ

SEQ ID NO: 27412 - protein, 16 aa, Homo sapiens
  ( 78 )...( 93 ): >PAX9_HUMAN
VTTPTVVKHIRTYKQR

SEQ ID NO: 27413 - protein, 16 aa, Homo sapiens
  ( 81 )...( 96 ): >PAX9_HUMAN
PTVVKHIRTYKQRDPG

SEQ ID NO: 27414 - protein, 16 aa, Homo sapiens
  ( 82 )...( 97 ): >PAX9_HUMAN
TVVKHIRTYKQRDPGI

SEQ ID NO: 27415 - protein, 16 aa, Homo sapiens
  ( 83 )...( 98 ): >PAX9_HUMAN
VVKHIRTYKQRDPGIF

SEQ ID NO: 27416 - protein, 16 aa, Homo sapiens
  ( 116 )...( 131 ): >PAX9_HUMAN
NVPSVSSISRILRNKI

SEQ ID NO: 27417 - protein, 16 aa, Homo sapiens
  ( 117 )...( 132 ): >PAX9_HUMAN
VPSVSSISRILRNKIG

SEQ ID NO: 27418 - protein, 16 aa, Homo sapiens
  ( 119 )...( 134 ): >PAX9_HUMAN
SVSSISRILRNKIGNL

SEQ ID NO: 27419 - protein, 16 aa, Homo sapiens
  ( 120 )...( 135 ): >PAX9_HUMAN
VSSISRILRNKIGNLA

SEQ ID NO: 27420 - protein, 16 aa, Homo sapiens
  ( 121 )...( 136 ): >PAX9_HUMAN
SSISRILRNKIGNLAQ

SEQ ID NO: 27421 - protein, 16 aa, Homo sapiens
  ( 122 )...( 137 ): >PAX9_HUMAN
SISRILRNKIGNLAQQ

SEQ ID NO: 27422 - protein, 16 aa, Homo sapiens
  ( 123 )...( 138 ): >PAX9_HUMAN
ISRILRNKIGNLAQQG

SEQ ID NO: 27423 - protein, 16 aa, Homo sapiens
  ( 124 )...( 139 ): >PAX9_HUMAN
SRILRNKIGNLAQQGH

SEQ ID NO: 27424 - protein, 16 aa, Homo sapiens
  ( 125 )...( 140 ): >PAX9_HUMAN
RILRNKIGNLAQQGHY

SEQ ID NO: 27425 - protein, 16 aa, Homo sapiens
  ( 128 )...( 143 ): >PER1_HUMAN
QSARARTQKELMTALR

SEQ ID NO: 27426 - protein, 16 aa, Homo sapiens
  ( 131 )...( 146 ): >PER1_HUMAN
RARTQKELMTALRELK

SEQ ID NO: 27427 - protein, 16 aa, Homo sapiens
  ( 133 )...( 148 ): >PER1_HUMAN
RTQKELMTALRELKLR

SEQ ID NO: 27428 - protein, 16 aa, Homo sapiens
  ( 140 )...( 155 ): >PER1_HUMAN
TALRELKLRLPPERRG

SEQ ID NO: 27429 - protein, 16 aa, Homo sapiens
  ( 142 )...( 157 ): >PER1_HUMAN
LRELKLRLPPERRGKG

SEQ ID NO: 27430 - protein, 16 aa, Homo sapiens
  ( 144 )...( 159 ): >PER1_HUMAN
ELKLRLPPERRGKGRS

SEQ ID NO: 27431 - protein, 16 aa, Homo sapiens
  ( 145 )...( 160 ): >PER1_HUMAN
LKLRLPPERRGKGRSG

SEQ ID NO: 27432 - protein, 16 aa, Homo sapiens
  ( 146 )...( 161 ): >PER1_HUMAN
KLRLPPERRGKGRSGT

SEQ ID NO: 27433 - protein, 16 aa, Homo sapiens
  ( 147 )...( 162 ): >PER1_HUMAN
LRLPPERRGKGRSGTL

SEQ ID NO: 27434 - protein, 16 aa, Homo sapiens
  ( 148 )...( 163 ): >PER1_HUMAN
RLPPERRGKGRSGTLA

SEQ ID NO: 27435 - protein, 16 aa, Homo sapiens
  ( 149 )...( 164 ): >PER1_HUMAN
LPPERRGKGRSGTLAT

SEQ ID NO: 27436 - protein, 16 aa, Homo sapiens
  ( 150 )...( 165 ): >PER1_HUMAN
PPERRGKGRSGTLATL

SEQ ID NO: 27437 - protein, 16 aa, Homo sapiens
  ( 151 )...( 166 ): >PER1_HUMAN
PERRGKGRSGTLATLQ

SEQ ID NO: 27438 - protein, 16 aa, Homo sapiens
  ( 152 )...( 167 ): >PER1_HUMAN
ERRGKGRSGTLATLQY

SEQ ID NO: 27439 - protein, 16 aa, Homo sapiens
  ( 153 )...( 168 ): >PER1_HUMAN
RRGKGRSGTLATLQYA

SEQ ID NO: 27440 - protein, 16 aa, Homo sapiens
  ( 154 )...( 169 ): >PER1_HUMAN
RGKGRSGTLATLQYAL

SEQ ID NO: 27441 - protein, 16 aa, Homo sapiens
  ( 237 )...( 252 ): >PER1_HUMAN
QAAVLLRCKRDVFRGT

SEQ ID NO: 27442 - protein, 16 aa, Homo sapiens
  ( 238 )...( 253 ): >PER1_HUMAN
AAVLLRCKRDVFRGTR

SEQ ID NO: 27443 - protein, 16 aa, Homo sapiens
  ( 239 )...( 254 ): >PER1_HUMAN
AVLLRCKRDVFRGTRF

SEQ ID NO: 27444 - protein, 16 aa, Homo sapiens
  ( 240 )...( 255 ): >PER1_HUMAN
VLLRCKRDVFRGTRFS

SEQ ID NO: 27445 - protein, 16 aa, Homo sapiens
  ( 310 )...( 325 ): >PER1_HUMAN
GPRYQPFRLTPYVTKI

SEQ ID NO: 27446 - protein, 16 aa, Homo sapiens
  ( 402 )...( 417 ): >PER1_HUMAN
RPLMLAIHKKILQLAG

SEQ ID NO: 27447 - protein, 16 aa, Homo sapiens
  ( 448 )...( 463 ): >PER1_HUMAN
WSRKVAFVLGRHKVRT

SEQ ID NO: 27448 - protein, 16 aa, Homo sapiens
  ( 449 )...( 464 ): >PER1_HUMAN
SRKVAFVLGRHKVRTA

SEQ ID NO: 27449 - protein, 16 aa, Homo sapiens
  ( 450 )...( 465 ): >PER1_HUMAN
RKVAFVLGRHKVRTAP

SEQ ID NO: 27450 - protein, 16 aa, Homo sapiens
  ( 451 )...( 466 ): >PER1_HUMAN
KVAFVLGRHKVRTAPL

SEQ ID NO: 27451 - protein, 16 aa, Homo sapiens
  ( 452 )...( 467 ): >PER1_HUMAN
VAFVLGRHKVRTAPLN

SEQ ID NO: 27452 - protein, 16 aa, Homo sapiens
  ( 565 )...( 580 ): >PER1_HUMAN
IESRARPQSRPRLPAT

SEQ ID NO: 27453 - protein, 16 aa, Homo sapiens
  ( 567 )...( 582 ): >PER1_HUMAN
SRARPQSRPRLPATGT

SEQ ID NO: 27454 - protein, 16 aa, Homo sapiens
  ( 568 )...( 583 ): >PER1_HUMAN
RARPQSRPRLPATGTF

SEQ ID NO: 27455 - protein, 16 aa, Homo sapiens
  ( 569 )...( 584 ): >PER1_HUMAN
ARPQSRPRLPATGTFK

SEQ ID NO: 27456 - protein, 16 aa, Homo sapiens
  ( 570 )...( 585 ): >PER1_HUMAN
RPQSRPRLPATGTFKA

SEQ ID NO: 27457 - protein, 16 aa, Homo sapiens
  ( 572 )...( 587 ): >PER1_HUMAN
QSRPRLPATGTFKAKA

SEQ ID NO: 27458 - protein, 16 aa, Homo sapiens
  ( 573 )...( 588 ): >PER1_HUMAN
SRPRLPATGTFKAKAL

SEQ ID NO: 27459 - protein, 16 aa, Homo sapiens
  ( 635 )...( 650 ): >PER1_HUMAN
LRYLESCNLPSTTKRK

SEQ ID NO: 27460 - protein, 16 aa, Homo sapiens
  ( 667 )...( 682 ): >PER1_HUMAN
RQRTGPVSVGTKKDPP

SEQ ID NO: 27461 - protein, 16 aa, Homo sapiens
  ( 792 )...( 807 ): >PER1_HUMAN
QAFLSRFRDLGRLRGL

SEQ ID NO: 27462 - protein, 16 aa, Homo sapiens
  ( 1177 )...( 1192 ): >PER1_HUMAN
QRRELGAVHSWVRKGQ

SEQ ID NO: 27463 - protein, 16 aa, Homo sapiens
  ( 1178 )...( 1193 ): >PER1_HUMAN
RRELGAVHSWVRKGQL

SEQ ID NO: 27464 - protein, 16 aa, Homo sapiens
  ( 1181 )...( 1196 ): >PER1_HUMAN
LGAVHSWVRKGQLPRA

SEQ ID NO: 27465 - protein, 16 aa, Homo sapiens
  ( 1182 )...( 1197 ): >PER1_HUMAN
GAVHSWVRKGQLPRAL

SEQ ID NO: 27466 - protein, 16 aa, Homo sapiens
  ( 116 )...( 131 ): >PER2_HUMAN
KELKVHLPADKKAKGK

SEQ ID NO: 27467 - protein, 16 aa, Homo sapiens
  ( 118 )...( 133 ): >PER2_HUMAN
LKVHLPADKKAKGKAS

SEQ ID NO: 27468 - protein, 16 aa, Homo sapiens
  ( 125 )...( 140 ): >PER2_HUMAN
DKKAKGKASTLATLKY

SEQ ID NO: 27469 - protein, 16 aa, Homo sapiens
  ( 126 )...( 141 ): >PER2_HUMAN
KKAKGKASTLATLKYA

SEQ ID NO: 27470 - protein, 16 aa, Homo sapiens
  ( 127 )...( 142 ): >PER2_HUMAN
KAKGKASTLATLKYAL

SEQ ID NO: 27471 - protein, 16 aa, Homo sapiens
  ( 128 )...( 143 ): >PER2_HUMAN
AKGKASTLATLKYALR

SEQ ID NO: 27472 - protein, 16 aa, Homo sapiens
  ( 129 )...( 144 ): >PER2_HUMAN
KGKASTLATLKYALRS

SEQ ID NO: 27473 - protein, 16 aa, Homo sapiens
  ( 131 )...( 146 ): >PER2_HUMAN
KASTLATLKYALRSVK

SEQ ID NO: 27474 - protein, 16 aa, Homo sapiens
  ( 134 )...( 149 ): >PER2_HUMAN
TLATLKYALRSVKQVK

SEQ ID NO: 27475 - protein, 16 aa, Homo sapiens
  ( 135 )...( 150 ): >PER2_HUMAN
LATLKYALRSVKQVKA

SEQ ID NO: 27476 - protein, 16 aa, Homo sapiens
  ( 136 )...( 151 ): >PER2_HUMAN
ATLKYALRSVKQVKAN

SEQ ID NO: 27477 - protein, 16 aa, Homo sapiens
  ( 137 )...( 152 ): >PER2_HUMAN
TLKYALRSVKQVKANE

SEQ ID NO: 27478 - protein, 16 aa, Homo sapiens
  ( 375 )...( 390 ): >PER2_HUMAN
RPLMLAIHKKILQSGG

SEQ ID NO: 27479 - protein, 16 aa, Homo sapiens
  ( 422 )...( 437 ): >PER2_HUMAN
SRKISFIIGRHKVRVG

SEQ ID NO: 27480 - protein, 16 aa, Homo sapiens
  ( 423 )...( 438 ): >PER2_HUMAN
RKISFIIGRHKVRVGP

SEQ ID NO: 27481 - protein, 16 aa, Homo sapiens
  ( 424 )...( 439 ): >PER2_HUMAN
KISFIIGRHKVRVGPL

SEQ ID NO: 27482 - protein, 16 aa, Homo sapiens
  ( 425 )...( 440 ): >PER2_HUMAN
ISFIIGRHKVRVGPLN

SEQ ID NO: 27483 - protein, 16 aa, Homo sapiens
  ( 765 )...( 780 ): >PER2_HUMAN
RSKGQPSERTAPGLRN

SEQ ID NO: 27484 - protein, 16 aa, Homo sapiens
  ( 781 )...( 796 ): >PER2_HUMAN
TSGIDSPWKKTGKNRK

SEQ ID NO: 27485 - protein, 16 aa, Homo sapiens
  ( 782 )...( 797 ): >PER2_HUMAN
SGIDSPWKKTGKNRKL

SEQ ID NO: 27486 - protein, 16 aa, Homo sapiens
  ( 783 )...( 798 ): >PER2_HUMAN
GIDSPWKKTGKNRKLK

SEQ ID NO: 27487 - protein, 16 aa, Homo sapiens
  ( 796 )...( 811 ): >PER2_HUMAN
KLKSKRVKPRDSSEST

SEQ ID NO: 27488 - protein, 16 aa, Homo sapiens
  ( 1023 )...( 1038 ): >PER2_HUMAN
KPGTSRDQQPKAPLTR

SEQ ID NO: 27489 - protein, 16 aa, Homo sapiens
  ( 317 )...( 332 ): >PER3_HUMAN
RSLMVAIHQKVLKYAG

SEQ ID NO: 27490 - protein, 16 aa, Homo sapiens
  ( 365 )...( 380 ): >PER3_HUMAN
SRKISFIIGRHKVRTS

SEQ ID NO: 27491 - protein, 16 aa, Homo sapiens
  ( 366 )...( 381 ): >PER3_HUMAN
RKISFIIGRHKVRTSP

SEQ ID NO: 27492 - protein, 16 aa, Homo sapiens
  ( 367 )...( 382 ): >PER3_HUMAN
KISFIIGRHKVRTSPL

SEQ ID NO: 27493 - protein, 16 aa, Homo sapiens
  ( 368 )...( 383 ): >PER3_HUMAN
ISFIIGRHKVRTSPLN

SEQ ID NO: 27494 - protein, 16 aa, Homo sapiens
  ( 739 )...( 754 ): >PER3_HUMAN
SAGCRKGKHKRKKLPE

SEQ ID NO: 27495 - protein, 16 aa, Homo sapiens
  ( 740 )...( 755 ): >PER3_HUMAN
AGCRKGKHKRKKLPEP

SEQ ID NO: 27496 - protein, 16 aa, Homo sapiens
  ( 26 )...( 41 ): >PHT1_HUMAN
KSIEQTQIKGLKNKPK

SEQ ID NO: 27497 - protein, 16 aa, Homo sapiens
  ( 27 )...( 42 ): >PHT1_HUMAN
SIEQTQIKGLKNKPKK

SEQ ID NO: 27498 - protein, 16 aa, Homo sapiens
  ( 28 )...( 43 ): >PHT1_HUMAN
IEQTQIKGLKNKPKKM

SEQ ID NO: 27499 - protein, 16 aa, Homo sapiens
  ( 29 )...( 44 ): >PHT1_HUMAN
EQTQIKGLKNKPKKMG

SEQ ID NO: 27500 - protein, 16 aa, Homo sapiens
  ( 30 )...( 45 ): >PHT1_HUMAN
QTQIKGLKNKPKKMGH

SEQ ID NO: 27501 - protein, 16 aa, Homo sapiens
  ( 31 )...( 46 ): >PHT1_HUMAN
TQIKGLKNKPKKMGHI

SEQ ID NO: 27502 - protein, 16 aa, Homo sapiens
  ( 32 )...( 47 ): >PHT1_HUMAN
QIKGLKNKPKKMGHIK

SEQ ID NO: 27503 - protein, 16 aa, Homo sapiens
  ( 33 )...( 48 ): >PHT1_HUMAN
IKGLKNKPKKMGHIKP

SEQ ID NO: 27504 - protein, 16 aa, Homo sapiens
  ( 34 )...( 49 ): >PHT1_HUMAN
KGLKNKPKKMGHIKPD

SEQ ID NO: 27505 - protein, 16 aa, Homo sapiens
  ( 35 )...( 50 ): >PHT1_HUMAN
GLKNKPKKMGHIKPDL

SEQ ID NO: 27506 - protein, 16 aa, Homo sapiens
  ( 36 )...( 51 ): >PHT1_HUMAN
LKNKPKKMGHIKPDLI

SEQ ID NO: 27507 - protein, 16 aa, Homo sapiens
  ( 61 )...( 76 ): >PHT1_HUMAN
FAKAKPEIPWTSLTRK

SEQ ID NO: 27508 - protein, 16 aa, Homo sapiens
  ( 62 )...( 77 ): >PHT1_HUMAN
AKAKPEIPWTSLTRKG

SEQ ID NO: 27509 - protein, 16 aa, Homo sapiens
  ( 63 )...( 78 ): >PHT1_HUMAN
KAKPEIPWTSLTRKGL

SEQ ID NO: 27510 - protein, 16 aa, Homo sapiens
  ( 65 )...( 80 ): >PHT1_HUMAN
KPEIPWTSLTRKGLVR

SEQ ID NO: 27511 - protein, 16 aa, Homo sapiens
  ( 68 )...( 83 ): >PHT1_HUMAN
IPWTSLTRKGLVRVVF

SEQ ID NO: 27512 - protein, 16 aa, Homo sapiens
  ( 69 )...( 84 ): >PHT1_HUMAN
PWTSLTRKGLVRVVFF

SEQ ID NO: 27513 - protein, 16 aa, Homo sapiens
  ( 70 )...( 85 ): >PHT1_HUMAN
WTSLTRKGLVRVVFFP

SEQ ID NO: 27514 - protein, 16 aa, Homo sapiens
  ( 71 )...( 86 ): >PHT1_HUMAN
TSLTRKGLVRVVFFPL

SEQ ID NO: 27515 - protein, 16 aa, Homo sapiens
  ( 74 )...( 89 ): >PHT1_HUMAN
TRKGLVRVVFFPLFSN

SEQ ID NO: 27516 - protein, 16 aa, Homo sapiens
  ( 146 )...( 161 ): >PHT1_HUMAN
VSTQITRPSGNNGNRR

SEQ ID NO: 27517 - protein, 16 aa, Homo sapiens
  ( 147 )...( 162 ): >PHT1_HUMAN
STQITRPSGNNGNRRR

SEQ ID NO: 27518 - protein, 16 aa, Homo sapiens
  ( 198 )...( 213 ): >PHT1_HUMAN
GGFWETIFGNRIKRVK

SEQ ID NO: 27519 - protein, 16 aa, Homo sapiens
  ( 199 )...( 214 ): >PHT1_HUMAN
GFWETIFGNRIKRVKL

SEQ ID NO: 27520 - protein, 16 aa, Homo sapiens
  ( 201 )...( 216 ): >PHT1_HUMAN
WETIFGNRIKRVKLIS

SEQ ID NO: 27521 - protein, 16 aa, Homo sapiens
  ( 202 )...( 217 ): >PHT1_HUMAN
ETIFGNRIKRVKLISN

SEQ ID NO: 27522 - protein, 16 aa, Homo sapiens
  ( 203 )...( 218 ): >PHT1_HUMAN
TIFGNRIKRVKLISNK

SEQ ID NO: 27523 - protein, 16 aa, Homo sapiens
  ( 204 )...( 219 ): >PHT1_HUMAN
IFGNRIKRVKLISNKG

SEQ ID NO: 27524 - protein, 16 aa, Homo sapiens
  ( 205 )...( 220 ): >PHT1_HUMAN
FGNRIKRVKLISNKGT

SEQ ID NO: 27525 - protein, 16 aa, Homo sapiens
  ( 206 )...( 221 ): >PHT1_HUMAN
GNRIKRVKLISNKGTE

SEQ ID NO: 27526 - protein, 16 aa, Homo sapiens
  ( 207 )...( 222 ): >PHT1_HUMAN
NRIKRVKLISNKGTET

SEQ ID NO: 27527 - protein, 16 aa, Homo sapiens
  ( 208 )...( 223 ): >PHT1_HUMAN
RIKRVKLISNKGTETD

SEQ ID NO: 27528 - protein, 16 aa, Homo sapiens
  ( 256 )...( 271 ): >PHT1_HUMAN
GEKCRREAFRRLGNGV

SEQ ID NO: 27529 - protein, 16 aa, Homo sapiens
  ( 257 )...( 272 ): >PHT1_HUMAN
EKCRREAFRRLGNGVS

SEQ ID NO: 27530 - protein, 16 aa, Homo sapiens
  ( 258 )...( 273 ): >PHT1_HUMAN
KCRREAFRRLGNGVSD

SEQ ID NO: 27531 - protein, 16 aa, Homo sapiens
  ( 301 )...( 316 ): >PHT1_HUMAN
NGCEVKNRKSILSRHL

SEQ ID NO: 27532 - protein, 16 aa, Homo sapiens
  ( 302 )...( 317 ): >PHT1_HUMAN
GCEVKNRKSILSRHLN

SEQ ID NO: 27533 - protein, 16 aa, Homo sapiens
  ( 305 )...( 320 ): >PHT1_HUMAN
VKNRKSILSRHLNSQV

SEQ ID NO: 27534 - protein, 16 aa, Homo sapiens
  ( 308 )...( 323 ): >PHT1_HUMAN
RKSILSRHLNSQVKKT

SEQ ID NO: 27535 - protein, 16 aa, Homo sapiens
  ( 311 )...( 326 ): >PHT1_HUMAN
ILSRHLNSQVKKTTTR

SEQ ID NO: 27536 - protein, 16 aa, Homo sapiens
  ( 317 )...( 332 ): >PHT1_HUMAN
NSQVKKTTTRWCHIVR

SEQ ID NO: 27537 - protein, 16 aa, Homo sapiens
  ( 560 )...( 575 ): >PHT1_HUMAN
LFAKLFSHITSARKAR

SEQ ID NO: 27538 - protein, 16 aa, Homo sapiens
  ( 561 )...( 576 ): >PHT1_HUMAN
FAKLFSHITSARKARK

SEQ ID NO: 27539 - protein, 16 aa, Homo sapiens
  ( 562 )...( 577 ): >PHT1_HUMAN
AKLFSHITSARKARKY

SEQ ID NO: 27540 - protein, 16 aa, Homo sapiens
  ( 597 )...( 612 ): >PHT1_HUMAN
RSYLKRRGPQRSVDVV

SEQ ID NO: 27541 - protein, 16 aa, Homo sapiens
  ( 598 )...( 613 ): >PHT1_HUMAN
SYLKRRGPQRSVDVVV

SEQ ID NO: 27542 - protein, 16 aa, Homo sapiens
  ( 599 )...( 614 ): >PHT1_HUMAN
YLKRRGPQRSVDVVVS

SEQ ID NO: 27543 - protein, 16 aa, Homo sapiens
  ( 600 )...( 615 ): >PHT1_HUMAN
LKRRGPQRSVDVVVSS

SEQ ID NO: 27544 - protein, 16 aa, Homo sapiens
  ( 601 )...( 616 ): >PHT1_HUMAN
KRRGPQRSVDVVVSSV

SEQ ID NO: 27545 - protein, 13 aa, Homo sapiens
  ( 750 )...( 765 ): >PHT1_HUMAN
LLGFNIRLWKIKS

SEQ ID NO: 27546 - protein, 16 aa, Homo sapiens
  ( 103 )...( 118 ): >PIT1_HUMAN
TAADFKQELRRKSKLV

SEQ ID NO: 27547 - protein, 16 aa, Homo sapiens
  ( 136 )...( 151 ): >PIT1_HUMAN
ANEFKVRRIKLGYTQT

SEQ ID NO: 27548 - protein, 16 aa, Homo sapiens
  ( 138 )...( 153 ): >PIT1_HUMAN
EFKVRRIKLGYTQTNV

SEQ ID NO: 27549 - protein, 16 aa, Homo sapiens
  ( 139 )...( 154 ): >PIT1_HUMAN
FKVRRIKLGYTQTNVG

SEQ ID NO: 27550 - protein, 16 aa, Homo sapiens
  ( 140 )...( 155 ): >PIT1_HUMAN
KVRRIKLGYTQTNVGE

SEQ ID NO: 27551 - protein, 16 aa, Homo sapiens
  ( 201 )...( 216 ): >PIT1_HUMAN
GALYNEKVGANERKRK

SEQ ID NO: 27552 - protein, 16 aa, Homo sapiens
  ( 206 )...( 221 ): >PIT1_HUMAN
EKVGANERKRKRRTTI

SEQ ID NO: 27553 - protein, 16 aa, Homo sapiens
  ( 207 )...( 222 ): >PIT1_HUMAN
KVGANERKRKRRTTIS

SEQ ID NO: 27554 - protein, 16 aa, Homo sapiens
  ( 208 )...( 223 ): >PIT1_HUMAN
VGANERKRKRRTTISI

SEQ ID NO: 27555 - protein, 16 aa, Homo sapiens
  ( 209 )...( 224 ): >PIT1_HUMAN
GANERKRKRRTTISIA

SEQ ID NO: 27556 - protein, 16 aa, Homo sapiens
  ( 210 )...( 225 ): >PIT1_HUMAN
ANERKRKRRTTISIAA

SEQ ID NO: 27557 - protein, 16 aa, Homo sapiens
  ( 213 )...( 228 ): >PIT1_HUMAN
RKRKRRTTISIAAKDA

SEQ ID NO: 27558 - protein, 16 aa, Homo sapiens
  ( 214 )...( 229 ): >PIT1_HUMAN
KRKRRTTISIAAKDAL

SEQ ID NO: 27559 - protein, 16 aa, Homo sapiens
  ( 215 )...( 230 ): >PIT1_HUMAN
RKRRTTISIAAKDALE

SEQ ID NO: 27560 - protein, 16 aa, Homo sapiens
  ( 216 )...( 231 ): >PIT1_HUMAN
KRRTTISIAAKDALER

SEQ ID NO: 27561 - protein, 16 aa, Homo sapiens
  ( 268 )...( 283 ): >PIT1_HUMAN
REKRVKTSLNQSLFSI

SEQ ID NO: 27562 - protein, 16 aa, Homo sapiens
  ( 270 )...( 285 ): >PIT1_HUMAN
KRVKTSLNQSLFSISK

SEQ ID NO: 27563 - protein, 16 aa, Homo sapiens
  ( 278 )...( 293 ): >PML_HUMAN
LIRERVRQVVAHVRAQ

SEQ ID NO: 27564 - protein, 16 aa, Homo sapiens
  ( 312 )...( 327 ): >PML_HUMAN
MASRLGRLDAVLQRIR

SEQ ID NO: 27565 - protein, 16 aa, Homo sapiens
  ( 313 )...( 328 ): >PML_HUMAN
ASRLGRLDAVLQRIRT

SEQ ID NO: 27566 - protein, 16 aa, Homo sapiens
  ( 314 )...( 329 ): >PML_HUMAN
SRLGRLDAVLQRIRTG

SEQ ID NO: 27567 - protein, 16 aa, Homo sapiens
  ( 315 )...( 330 ): >PML_HUMAN
RLGRLDAVLQRIRTGS

SEQ ID NO: 27568 - protein, 16 aa, Homo sapiens
  ( 321 )...( 336 ): >PML_HUMAN
AVLQRIRTGSALVQRM

SEQ ID NO: 27569 - protein, 16 aa, Homo sapiens
  ( 322 )...( 337 ): >PML_HUMAN
VLQRIRTGSALVQRMK

SEQ ID NO: 27570 - protein, 16 aa, Homo sapiens
  ( 323 )...( 338 ): >PML_HUMAN
LQRIRTGSALVQRMKC

SEQ ID NO: 27571 - protein, 16 aa, Homo sapiens
  ( 324 )...( 339 ): >PML_HUMAN
QRIRTGSALVQRMKCY

SEQ ID NO: 27572 - protein, 16 aa, Homo sapiens
  ( 325 )...( 340 ): >PML_HUMAN
RIRTGSALVQRMKCYA

SEQ ID NO: 27573 - protein, 16 aa, Homo sapiens
  ( 471 )...( 486 ): >PML_HUMAN
TTTAQKRKCSQTQCPR

SEQ ID NO: 27574 - protein, 16 aa, Homo sapiens
  ( 472 )...( 487 ): >PML_HUMAN
TTAQKRKCSQTQCPRK

SEQ ID NO: 27575 - protein, 16 aa, Homo sapiens
  ( 473 )...( 488 ): >PML_HUMAN
TAQKRKCSQTQCPRKV

SEQ ID NO: 27576 - protein, 16 aa, Homo sapiens
  ( 474 )...( 489 ): >PML_HUMAN
AQKRKCSQTQCPRKVI

SEQ ID NO: 27577 - protein, 16 aa, Homo sapiens
  ( 475 )...( 490 ): >PML_HUMAN
QKRKCSQTQCPRKVIK

SEQ ID NO: 27578 - protein, 16 aa, Homo sapiens
  ( 476 )...( 491 ): >PML_HUMAN
KRKCSQTQCPRKVIKM

SEQ ID NO: 27579 - protein, 16 aa, Homo sapiens
  ( 477 )...( 492 ): >PML_HUMAN
RKCSQTQCPRKVIKME

SEQ ID NO: 27580 - protein, 16 aa, Homo sapiens
  ( 622 )...( 637 ): >PML_HUMAN
QKISQLAAVNRESKFR

SEQ ID NO: 27581 - protein, 16 aa, Homo sapiens
  ( 623 )...( 638 ): >PML_HUMAN
KISQLAAVNRESKFRV

SEQ ID NO: 27582 - protein, 16 aa, Homo sapiens
  ( 712 )...( 727 ): >PML_HUMAN
PLIRERVPGASSFKLK

SEQ ID NO: 27583 - protein, 16 aa, Homo sapiens
  ( 713 )...( 728 ): >PML_HUMAN
LIRERVPGASSFKLKN

SEQ ID NO: 27584 - protein, 16 aa, Homo sapiens
  ( 714 )...( 729 ): >PML_HUMAN
IRERVPGASSFKLKNL

SEQ ID NO: 27585 - protein, 16 aa, Homo sapiens
  ( 715 )...( 730 ): >PML_HUMAN
RERVPGASSFKLKNLA

SEQ ID NO: 27586 - protein, 16 aa, Homo sapiens
  ( 721 )...( 736 ): >PML_HUMAN
ASSFKLKNLAQTYLAR

SEQ ID NO: 27587 - protein, 16 aa, Homo sapiens
  ( 807 )...( 822 ): >PML_HUMAN
ELLSAHRRDRQGGLKK

SEQ ID NO: 27588 - protein, 16 aa, Homo sapiens
  ( 808 )...( 823 ): >PML_HUMAN
LLSAHRRDRQGGLKKY

SEQ ID NO: 27589 - protein, 16 aa, Homo sapiens
  ( 809 )...( 824 ): >PML_HUMAN
LSAHRRDRQGGLKKYS

SEQ ID NO: 27590 - protein, 16 aa, Homo sapiens
  ( 815 )...( 830 ): >PML_HUMAN
DRQGGLKKYSRYLSLQ

SEQ ID NO: 27591 - protein, 16 aa, Homo sapiens
  ( 816 )...( 831 ): >PML_HUMAN
RQGGLKKYSRYLSLQT

SEQ ID NO: 27592 - protein, 16 aa, Homo sapiens
  ( 97 )...( 112 ): >PMXB_HUMAN
KQRRIRTTFTSAQLKE

SEQ ID NO: 27593 - protein, 16 aa, Homo sapiens
  ( 98 )...( 113 ): >PMXB_HUMAN
QRRIRTTFTSAQLKEL

SEQ ID NO: 27594 - protein, 16 aa, Homo sapiens
  ( 149 )...( 164 ): >PMXB_HUMAN
RRAKFRKQERAAAAAA

SEQ ID NO: 27595 - protein, 16 aa, Homo sapiens
  ( 150 )...( 165 ): >PMXB_HUMAN
RAKFRKQERAAAAAAA

SEQ ID NO: 27596 - protein, 16 aa, Homo sapiens
  ( 288 )...( 303 ): >PO21_HUMAN
LEQFAKTFKQRRIKLG

SEQ ID NO: 27597 - protein, 16 aa, Homo sapiens
  ( 292 )...( 307 ): >PO21_HUMAN
AKTFKQRRIKLGFTQG

SEQ ID NO: 27598 - protein, 16 aa, Homo sapiens
  ( 293 )...( 308 ): >PO21_HUMAN
KTFKQRRIKLGFTQGD

SEQ ID NO: 27599 - protein, 16 aa, Homo sapiens
  ( 294 )...( 309 ): >PO21_HUMAN
TFKQRRIKLGFTQGDV

SEQ ID NO: 27600 - protein, 16 aa, Homo sapiens
  ( 295 )...( 310 ): >PO21_HUMAN
FKQRRIKLGFTQGDVG

SEQ ID NO: 27601 - protein, 16 aa, Homo sapiens
  ( 296 )...( 311 ): >PO21_HUMAN
KQRRIKLGFTQGDVGL

SEQ ID NO: 27602 - protein, 16 aa, Homo sapiens
  ( 366 )...( 381 ): >PO21_HUMAN
SALNSPGIEGLSRRRK

SEQ ID NO: 27603 - protein, 16 aa, Homo sapiens
  ( 367 )...( 382 ): >PO21_HUMAN
ALNSPGIEGLSRRRKK

SEQ ID NO: 27604 - protein, 16 aa, Homo sapiens
  ( 368 )...( 383 ): >PO21_HUMAN
LNSPGIEGLSRRRKKR

SEQ ID NO: 27605 - protein, 16 aa, Homo sapiens
  ( 369 )...( 384 ): >PO21_HUMAN
NSPGIEGLSRRRKKRT

SEQ ID NO: 27606 - protein, 16 aa, Homo sapiens
  ( 370 )...( 385 ): >PO21_HUMAN
SPGIEGLSRRRKKRTS

SEQ ID NO: 27607 - protein, 16 aa, Homo sapiens
  ( 371 )...( 386 ): >PO21_HUMAN
PGIEGLSRRRKKRTSI

SEQ ID NO: 27608 - protein, 16 aa, Homo sapiens
  ( 372 )...( 387 ): >PO21_HUMAN
GIEGLSRRRKKRTSIE

SEQ ID NO: 27609 - protein, 16 aa, Homo sapiens
  ( 373 )...( 388 ): >PO21_HUMAN
IEGLSRRRKKRTSIET

SEQ ID NO: 27610 - protein, 16 aa, Homo sapiens
  ( 375 )...( 390 ): >PO21_HUMAN
GLSRRRKKRTSIETNI

SEQ ID NO: 27611 - protein, 16 aa, Homo sapiens
  ( 379 )...( 394 ): >PO21_HUMAN
RRKKRTSIETNIRVAL

SEQ ID NO: 27612 - protein, 16 aa, Homo sapiens
  ( 380 )...( 395 ): >PO21_HUMAN
RKKRTSIETNIRVALE

SEQ ID NO: 27613 - protein, 16 aa, Homo sapiens
  ( 381 )...( 396 ): >PO21_HUMAN
KKRTSIETNIRVALEK

SEQ ID NO: 27614 - protein, 16 aa, Homo sapiens
  ( 430 )...( 445 ): >PO21_HUMAN
RRQKEKRINPPSSGGT

SEQ ID NO: 27615 - protein, 16 aa, Homo sapiens
  ( 206 )...( 221 ): >PO22_HUMAN
ARTFKQRRIKLGFTQG

SEQ ID NO: 27616 - protein, 16 aa, Homo sapiens
  ( 207 )...( 222 ): >PO22_HUMAN
RTFKQRRIKLGFTQGD

SEQ ID NO: 27617 - protein, 16 aa, Homo sapiens
  ( 208 )...( 223 ): >PO22_HUMAN
TFKQRRIKLGFTQGDV

SEQ ID NO: 27618 - protein, 16 aa, Homo sapiens
  ( 209 )...( 224 ): >PO22_HUMAN
FKQRRIKLGFTQGDVG

SEQ ID NO: 27619 - protein, 16 aa, Homo sapiens
  ( 210 )...( 225 ): >PO22_HUMAN
KQRRIKLGFTQGDVGL

SEQ ID NO: 27620 - protein, 16 aa, Homo sapiens
  ( 285 )...( 300 ): >PO22_HUMAN
PSLGFDGLPGRRRKKR

SEQ ID NO: 27621 - protein, 16 aa, Homo sapiens
  ( 286 )...( 301 ): >PO22_HUMAN
SLGFDGLPGRRRKKRT

SEQ ID NO: 27622 - protein, 16 aa, Homo sapiens
  ( 287 )...( 302 ): >PO22_HUMAN
LGFDGLPGRRRKKRTS

SEQ ID NO: 27623 - protein, 16 aa, Homo sapiens
  ( 288 )...( 303 ): >PO22_HUMAN
GFDGLPGRRRKKRTSI

SEQ ID NO: 27624 - protein, 16 aa, Homo sapiens
  ( 290 )...( 305 ): >PO22_HUMAN
DGLPGRRRKKRTSIET

SEQ ID NO: 27625 - protein, 16 aa, Homo sapiens
  ( 291 )...( 306 ): >PO22_HUMAN
GLPGRRRKKRTSIETN

SEQ ID NO: 27626 - protein, 16 aa, Homo sapiens
  ( 292 )...( 307 ): >PO22_HUMAN
LPGRRRKKRTSIETNV

SEQ ID NO: 27627 - protein, 16 aa, Homo sapiens
  ( 297 )...( 312 ): >PO22_HUMAN
RKKRTSIETNVRFALE

SEQ ID NO: 27628 - protein, 16 aa, Homo sapiens
  ( 298 )...( 313 ): >PO22_HUMAN
KKRTSIETNVRFALEK

SEQ ID NO: 27629 - protein, 16 aa, Homo sapiens
  ( 195 )...( 210 ): >PO23_HUMAN
AKTFKQRRIKLGFTQG

SEQ ID NO: 27630 - protein, 16 aa, Homo sapiens
  ( 196 )...( 211 ): >PO23_HUMAN
KTFKQRRIKLGFTQGD

SEQ ID NO: 27631 - protein, 16 aa, Homo sapiens
  ( 197 )...( 212 ): >PO23_HUMAN
TFKQRRIKLGFTQGDV

SEQ ID NO: 27632 - protein, 16 aa, Homo sapiens
  ( 198 )...( 213 ): >PO23_HUMAN
FKQRRIKLGFTQGDVG

SEQ ID NO: 27633 - protein, 16 aa, Homo sapiens
  ( 199 )...( 214 ): >PO23_HUMAN
KQRRIKLGFTQGDVGL

SEQ ID NO: 27634 - protein, 16 aa, Homo sapiens
  ( 272 )...( 287 ): >PO23_HUMAN
PSLSEVFGRKRKKRTS

SEQ ID NO: 27635 - protein, 16 aa, Homo sapiens
  ( 273 )...( 288 ): >PO23_HUMAN
SLSEVFGRKRKKRTSI

SEQ ID NO: 27636 - protein, 16 aa, Homo sapiens
  ( 274 )...( 289 ): >PO23_HUMAN
LSEVFGRKRKKRTSIE

SEQ ID NO: 27637 - protein, 16 aa, Homo sapiens
  ( 275 )...( 290 ): >PO23_HUMAN
SEVFGRKRKKRTSIET

SEQ ID NO: 27638 - protein, 16 aa, Homo sapiens
  ( 277 )...( 292 ): >PO23_HUMAN
VFGRKRKKRTSIETNI

SEQ ID NO: 27639 - protein, 16 aa, Homo sapiens
  ( 281 )...( 296 ): >PO23_HUMAN
KRKKRTSIETNIRLTL

SEQ ID NO: 27640 - protein, 16 aa, Homo sapiens
  ( 282 )...( 297 ): >PO23_HUMAN
RKKRTSIETNIRLTLE

SEQ ID NO: 27641 - protein, 16 aa, Homo sapiens
  ( 284 )...( 299 ): >PO23_HUMAN
KRTSIETNIRLTLEKR

SEQ ID NO: 27642 - protein, 16 aa, Homo sapiens
  ( 332 )...( 347 ): >PO23_HUMAN
RRQKEKRINCPVATPI

SEQ ID NO: 27643 - protein, 16 aa, Homo sapiens
  ( 333 )...( 348 ): >PO23_HUMAN
RQKEKRINCPVATPIK

SEQ ID NO: 27644 - protein, 16 aa, Homo sapiens
  ( 256 )...( 271 ): >PO31_HUMAN
AKQFKQRRIKLGFTQA

SEQ ID NO: 27645 - protein, 16 aa, Homo sapiens
  ( 258 )...( 273 ): >PO31_HUMAN
QFKQRRIKLGFTQADV

SEQ ID NO: 27646 - protein, 16 aa, Homo sapiens
  ( 259 )...( 274 ): >PO31_HUMAN
FKQRRIKLGFTQADVG

SEQ ID NO: 27647 - protein, 16 aa, Homo sapiens
  ( 260 )...( 275 ): >PO31_HUMAN
KQRRIKLGFTQADVGL

SEQ ID NO: 27648 - protein, 16 aa, Homo sapiens
  ( 322 )...( 337 ): >PO31_HUMAN
GSPTNLDKIAAQGRKR

SEQ ID NO: 27649 - protein, 16 aa, Homo sapiens
  ( 323 )...( 338 ): >PO31_HUMAN
SPTNLDKIAAQGRKRK

SEQ ID NO: 27650 - protein, 16 aa, Homo sapiens
  ( 324 )...( 339 ): >PO31_HUMAN
PTNLDKIAAQGRKRKK

SEQ ID NO: 27651 - protein, 16 aa, Homo sapiens
  ( 327 )...( 342 ): >PO31_HUMAN
LDKIAAQGRKRKKRTS

SEQ ID NO: 27652 - protein, 16 aa, Homo sapiens
  ( 328 )...( 343 ): >PO31_HUMAN
DKIAAQGRKRKKRTSI

SEQ ID NO: 27653 - protein, 16 aa, Homo sapiens
  ( 329 )...( 344 ): >PO31_HUMAN
KIAAQGRKRKKRTSIE

SEQ ID NO: 27654 - protein, 16 aa, Homo sapiens
  ( 330 )...( 345 ): >PO31_HUMAN
IAAQGRKRKKRTSIEV

SEQ ID NO: 27655 - protein, 16 aa, Homo sapiens
  ( 331 )...( 346 ): >PO31_HUMAN
AAQGRKRKKRTSIEVG

SEQ ID NO: 27656 - protein, 16 aa, Homo sapiens
  ( 332 )...( 347 ): >PO31_HUMAN
AQGRKRKKRTSIEVGV

SEQ ID NO: 27657 - protein, 16 aa, Homo sapiens
  ( 333 )...( 348 ): >PO31_HUMAN
QGRKRKKRTSIEVGVK

SEQ ID NO: 27658 - protein, 16 aa, Homo sapiens
  ( 334 )...( 349 ): >PO31_HUMAN
GRKRKKRTSIEVGVKG

SEQ ID NO: 27659 - protein, 16 aa, Homo sapiens
  ( 335 )...( 350 ): >PO31_HUMAN
RKRKKRTSIEVGVKGA

SEQ ID NO: 27660 - protein, 16 aa, Homo sapiens
  ( 336 )...( 351 ): >PO31_HUMAN
KRKKRTSIEVGVKGAL

SEQ ID NO: 27661 - protein, 16 aa, Homo sapiens
  ( 337 )...( 352 ): >PO31_HUMAN
RKKRTSIEVGVKGALE

SEQ ID NO: 27662 - protein, 16 aa, Homo sapiens
  ( 385 )...( 400 ): >PO31_HUMAN
CNRRQKEKRMTPAAGA

SEQ ID NO: 27663 - protein, 16 aa, Homo sapiens
  ( 386 )...( 401 ): >PO31_HUMAN
NRRQKEKRMTPAAGAG

SEQ ID NO: 27664 - protein, 16 aa, Homo sapiens
  ( 387 )...( 402 ): >PO31_HUMAN
RRQKEKRMTPAAGAGH

SEQ ID NO: 27665 - protein, 16 aa, Homo sapiens
  ( 274 )...( 289 ): >PO32_HUMAN
AKQFKQRRIKLGFTQA

SEQ ID NO: 27666 - protein, 16 aa, Homo sapiens
  ( 276 )...( 291 ): >PO32_HUMAN
QFKQRRIKLGFTQADV

SEQ ID NO: 27667 - protein, 16 aa, Homo sapiens
  ( 277 )...( 292 ): >PO32_HUMAN
FKQRRIKLGFTQADVG

SEQ ID NO: 27668 - protein, 16 aa, Homo sapiens
  ( 278 )...( 293 ): >PO32_HUMAN
KQRRIKLGFTQADVGL

SEQ ID NO: 27669 - protein, 16 aa, Homo sapiens
  ( 340 )...( 355 ): >PO32_HUMAN
GSPTSIDKIAAQGRKR

SEQ ID NO: 27670 - protein, 16 aa, Homo sapiens
  ( 341 )...( 356 ): >PO32_HUMAN
SPTSIDKIAAQGRKRK

SEQ ID NO: 27671 - protein, 16 aa, Homo sapiens
  ( 342 )...( 357 ): >PO32_HUMAN
PTSIDKIAAQGRKRKK

SEQ ID NO: 27672 - protein, 16 aa, Homo sapiens
  ( 343 )...( 358 ): >PO32_HUMAN
TSIDKIAAQGRKRKKR

SEQ ID NO: 27673 - protein, 16 aa, Homo sapiens
  ( 344 )...( 359 ): >PO32_HUMAN
SIDKIAAQGRKRKKRT

SEQ ID NO: 27674 - protein, 16 aa, Homo sapiens
  ( 345 )...( 360 ): >PO32_HUMAN
IDKIAAQGRKRKKRTS

SEQ ID NO: 27675 - protein, 16 aa, Homo sapiens
  ( 346 )...( 361 ): >PO32_HUMAN
DKIAAQGRKRKKRTSI

SEQ ID NO: 27676 - protein, 16 aa, Homo sapiens
  ( 347 )...( 362 ): >PO32_HUMAN
KIAAQGRKRKKRTSIE

SEQ ID NO: 27677 - protein, 16 aa, Homo sapiens
  ( 348 )...( 363 ): >PO32_HUMAN
IAAQGRKRKKRTSIEV

SEQ ID NO: 27678 - protein, 16 aa, Homo sapiens
  ( 349 )...( 364 ): >PO32_HUMAN
AAQGRKRKKRTSIEVS

SEQ ID NO: 27679 - protein, 16 aa, Homo sapiens
  ( 350 )...( 365 ): >PO32_HUMAN
AQGRKRKKRTSIEVSV

SEQ ID NO: 27680 - protein, 16 aa, Homo sapiens
  ( 351 )...( 366 ): >PO32_HUMAN
QGRKRKKRTSIEVSVK

SEQ ID NO: 27681 - protein, 16 aa, Homo sapiens
  ( 352 )...( 367 ): >PO32_HUMAN
GRKRKKRTSIEVSVKG

SEQ ID NO: 27682 - protein, 16 aa, Homo sapiens
  ( 353 )...( 368 ): >PO32_HUMAN
RKRKKRTSIEVSVKGA

SEQ ID NO: 27683 - protein, 16 aa, Homo sapiens
  ( 354 )...( 369 ): >PO32_HUMAN
KRKKRTSIEVSVKGAL

SEQ ID NO: 27684 - protein, 16 aa, Homo sapiens
  ( 355 )...( 370 ): >PO32_HUMAN
RKKRTSIEVSVKGALE

SEQ ID NO: 27685 - protein, 16 aa, Homo sapiens
  ( 403 )...( 418 ): >PO32_HUMAN
CNRRQKEKRMTPPGGT

SEQ ID NO: 27686 - protein, 16 aa, Homo sapiens
  ( 404 )...( 419 ): >PO32_HUMAN
NRRQKEKRMTPPGGTL

SEQ ID NO: 27687 - protein, 16 aa, Homo sapiens
  ( 405 )...( 420 ): >PO32_HUMAN
RRQKEKRMTPPGGTLP

SEQ ID NO: 27688 - protein, 16 aa, Homo sapiens
  ( 406 )...( 421 ): >PO32_HUMAN
RQKEKRMTPPGGTLPG

SEQ ID NO: 27689 - protein, 16 aa, Homo sapiens
  ( 326 )...( 341 ): >PO33_HUMAN
AKQFKQRRIKLGFTQA

SEQ ID NO: 27690 - protein, 16 aa, Homo sapiens
  ( 328 )...( 343 ): >PO33_HUMAN
QFKQRRIKLGFTQADV

SEQ ID NO: 27691 - protein, 16 aa, Homo sapiens
  ( 329 )...( 344 ): >PO33_HUMAN
FKQRRIKLGFTQADVG

SEQ ID NO: 27692 - protein, 16 aa, Homo sapiens
  ( 330 )...( 345 ): >PO33_HUMAN
KQRRIKLGFTQADVGL

SEQ ID NO: 27693 - protein, 16 aa, Homo sapiens
  ( 392 )...( 407 ): >PO33_HUMAN
GSPTSIDKIAAQGRKR

SEQ ID NO: 27694 - protein, 16 aa, Homo sapiens
  ( 393 )...( 408 ): >PO33_HUMAN
SPTSIDKIAAQGRKRK

SEQ ID NO: 27695 - protein, 16 aa, Homo sapiens
  ( 394 )...( 409 ): >PO33_HUMAN
PTSIDKIAAQGRKRKK

SEQ ID NO: 27696 - protein, 16 aa, Homo sapiens
  ( 395 )...( 410 ): >PO33_HUMAN
TSIDKIAAQGRKRKKR

SEQ ID NO: 27697 - protein, 16 aa, Homo sapiens
  ( 396 )...( 411 ): >PO33_HUMAN
SIDKIAAQGRKRKKRT

SEQ ID NO: 27698 - protein, 16 aa, Homo sapiens
  ( 397 )...( 412 ): >PO33_HUMAN
IDKIAAQGRKRKKRTS

SEQ ID NO: 27699 - protein, 16 aa, Homo sapiens
  ( 398 )...( 413 ): >PO33_HUMAN
DKIAAQGRKRKKRTSI

SEQ ID NO: 27700 - protein, 16 aa, Homo sapiens
  ( 399 )...( 414 ): >PO33_HUMAN
KIAAQGRKRKKRTSIE

SEQ ID NO: 27701 - protein, 16 aa, Homo sapiens
  ( 400 )...( 415 ): >PO33_HUMAN
IAAQGRKRKKRTSIEV

SEQ ID NO: 27702 - protein, 16 aa, Homo sapiens
  ( 401 )...( 416 ): >PO33_HUMAN
AAQGRKRKKRTSIEVS

SEQ ID NO: 27703 - protein, 16 aa, Homo sapiens
  ( 402 )...( 417 ): >PO33_HUMAN
AQGRKRKKRTSIEVSV

SEQ ID NO: 27704 - protein, 16 aa, Homo sapiens
  ( 403 )...( 418 ): >PO33_HUMAN
QGRKRKKRTSIEVSVK

SEQ ID NO: 27705 - protein, 16 aa, Homo sapiens
  ( 404 )...( 419 ): >PO33_HUMAN
GRKRKKRTSIEVSVKG

SEQ ID NO: 27706 - protein, 16 aa, Homo sapiens
  ( 405 )...( 420 ): >PO33_HUMAN
RKRKKRTSIEVSVKGA

SEQ ID NO: 27707 - protein, 16 aa, Homo sapiens
  ( 406 )...( 421 ): >PO33_HUMAN
KRKKRTSIEVSVKGAL

SEQ ID NO: 27708 - protein, 16 aa, Homo sapiens
  ( 407 )...( 422 ): >PO33_HUMAN
RKKRTSIEVSVKGALE

SEQ ID NO: 27709 - protein, 16 aa, Homo sapiens
  ( 458 )...( 473 ): >PO33_HUMAN
RQKEKRMTPPGIQQQT

SEQ ID NO: 27710 - protein, 16 aa, Homo sapiens
  ( 198 )...( 213 ): >PO34_HUMAN
AKQFKQRRIKLGFTQA

SEQ ID NO: 27711 - protein, 16 aa, Homo sapiens
  ( 200 )...( 215 ): >PO34_HUMAN
QFKQRRIKLGFTQADV

SEQ ID NO: 27712 - protein, 16 aa, Homo sapiens
  ( 201 )...( 216 ): >PO34_HUMAN
FKQRRIKLGFTQADVG

SEQ ID NO: 27713 - protein, 16 aa, Homo sapiens
  ( 202 )...( 217 ): >PO34_HUMAN
KQRRIKLGFTQADVGL

SEQ ID NO: 27714 - protein, 16 aa, Homo sapiens
  ( 264 )...( 279 ): >PO34_HUMAN
GSPTSIDKIAAQGRKR

SEQ ID NO: 27715 - protein, 16 aa, Homo sapiens
  ( 265 )...( 280 ): >PO34_HUMAN
SPTSIDKIAAQGRKRK

SEQ ID NO: 27716 - protein, 16 aa, Homo sapiens
  ( 266 )...( 281 ): >PO34_HUMAN
PTSIDKIAAQGRKRKK

SEQ ID NO: 27717 - protein, 16 aa, Homo sapiens
  ( 267 )...( 282 ): >PO34_HUMAN
TSIDKIAAQGRKRKKR

SEQ ID NO: 27718 - protein, 16 aa, Homo sapiens
  ( 268 )...( 283 ): >PO34_HUMAN
SIDKIAAQGRKRKKRT

SEQ ID NO: 27719 - protein, 16 aa, Homo sapiens
  ( 269 )...( 284 ): >PO34_HUMAN
IDKIAAQGRKRKKRTS

SEQ ID NO: 27720 - protein, 16 aa, Homo sapiens
  ( 270 )...( 285 ): >PO34_HUMAN
DKIAAQGRKRKKRTSI

SEQ ID NO: 27721 - protein, 16 aa, Homo sapiens
  ( 271 )...( 286 ): >PO34_HUMAN
KIAAQGRKRKKRTSIE

SEQ ID NO: 27722 - protein, 16 aa, Homo sapiens
  ( 272 )...( 287 ): >PO34_HUMAN
IAAQGRKRKKRTSIEV

SEQ ID NO: 27723 - protein, 16 aa, Homo sapiens
  ( 273 )...( 288 ): >PO34_HUMAN
AAQGRKRKKRTSIEVS

SEQ ID NO: 27724 - protein, 16 aa, Homo sapiens
  ( 274 )...( 289 ): >PO34_HUMAN
AQGRKRKKRTSIEVSV

SEQ ID NO: 27725 - protein, 16 aa, Homo sapiens
  ( 275 )...( 290 ): >PO34_HUMAN
QGRKRKKRTSIEVSVK

SEQ ID NO: 27726 - protein, 16 aa, Homo sapiens
  ( 276 )...( 291 ): >PO34_HUMAN
GRKRKKRTSIEVSVKG

SEQ ID NO: 27727 - protein, 16 aa, Homo sapiens
  ( 277 )...( 292 ): >PO34_HUMAN
RKRKKRTSIEVSVKGV

SEQ ID NO: 27728 - protein, 16 aa, Homo sapiens
  ( 278 )...( 293 ): >PO34_HUMAN
KRKKRTSIEVSVKGVL

SEQ ID NO: 27729 - protein, 16 aa, Homo sapiens
  ( 279 )...( 294 ): >PO34_HUMAN
RKKRTSIEVSVKGVLE

SEQ ID NO: 27730 - protein, 16 aa, Homo sapiens
  ( 273 )...( 288 ): >PO41_HUMAN
EAFAERFKQRRIKLGV

SEQ ID NO: 27731 - protein, 16 aa, Homo sapiens
  ( 274 )...( 289 ): >PO41_HUMAN
AFAERFKQRRIKLGVT

SEQ ID NO: 27732 - protein, 16 aa, Homo sapiens
  ( 276 )...( 291 ): >PO41_HUMAN
AERFKQRRIKLGVTQA

SEQ ID NO: 27733 - protein, 16 aa, Homo sapiens
  ( 277 )...( 292 ): >PO41_HUMAN
ERFKQRRIKLGVTQAD

SEQ ID NO: 27734 - protein, 16 aa, Homo sapiens
  ( 278 )...( 293 ): >PO41_HUMAN
RFKQRRIKLGVTQADV

SEQ ID NO: 27735 - protein, 16 aa, Homo sapiens
  ( 279 )...( 294 ): >PO41_HUMAN
FKQRRIKLGVTQADVG

SEQ ID NO: 27736 - protein, 16 aa, Homo sapiens
  ( 280 )...( 295 ): >PO41_HUMAN
KQRRIKLGVTQADVGS

SEQ ID NO: 27737 - protein, 16 aa, Homo sapiens
  ( 351 )...( 366 ): >PO41_HUMAN
PELFNGGEKKRKRTSI

SEQ ID NO: 27738 - protein, 16 aa, Homo sapiens
  ( 352 )...( 367 ): >PO41_HUMAN
ELFNGGEKKRKRTSIA

SEQ ID NO: 27739 - protein, 16 aa, Homo sapiens
  ( 353 )...( 368 ): >PO41_HUMAN
LFNGGEKKRKRTSIAA

SEQ ID NO: 27740 - protein, 16 aa, Homo sapiens
  ( 354 )...( 369 ): >PO41_HUMAN
FNGGEKKRKRTSIAAP

SEQ ID NO: 27741 - protein, 16 aa, Homo sapiens
  ( 355 )...( 370 ): >PO41_HUMAN
NGGEKKRKRTSIAAPE

SEQ ID NO: 27742 - protein, 16 aa, Homo sapiens
  ( 356 )...( 371 ): >PO41_HUMAN
GGEKKRKRTSIAAPEK

SEQ ID NO: 27743 - protein, 16 aa, Homo sapiens
  ( 357 )...( 372 ): >PO41_HUMAN
GEKKRKRTSIAAPEKR

SEQ ID NO: 27744 - protein, 16 aa, Homo sapiens
  ( 359 )...( 374 ): >PO41_HUMAN
KKRKRTSIAAPEKRSL

SEQ ID NO: 27745 - protein, 16 aa, Homo sapiens
  ( 360 )...( 375 ): >PO41_HUMAN
KRKRTSIAAPEKRSLE

SEQ ID NO: 27746 - protein, 16 aa, Homo sapiens
  ( 361 )...( 376 ): >PO41_HUMAN
RKRTSIAAPEKRSLEA

SEQ ID NO: 27747 - protein, 16 aa, Homo sapiens
  ( 260 )...( 275 ): >PO42_HUMAN
EAFAERFKQRRIKLGV

SEQ ID NO: 27748 - protein, 16 aa, Homo sapiens
  ( 261 )...( 276 ): >PO42_HUMAN
AFAERFKQRRIKLGVT

SEQ ID NO: 27749 - protein, 16 aa, Homo sapiens
  ( 263 )...( 278 ): >PO42_HUMAN
AERFKQRRIKLGVTQA

SEQ ID NO: 27750 - protein, 16 aa, Homo sapiens
  ( 264 )...( 279 ): >PO42_HUMAN
ERFKQRRIKLGVTQAD

SEQ ID NO: 27751 - protein, 16 aa, Homo sapiens
  ( 265 )...( 280 ): >PO42_HUMAN
RFKQRRIKLGVTQADV

SEQ ID NO: 27752 - protein, 16 aa, Homo sapiens
  ( 266 )...( 281 ): >PO42_HUMAN
FKQRRIKLGVTQADVG

SEQ ID NO: 27753 - protein, 16 aa, Homo sapiens
  ( 267 )...( 282 ): >PO42_HUMAN
KQRRIKLGVTQADVGS

SEQ ID NO: 27754 - protein, 16 aa, Homo sapiens
  ( 338 )...( 353 ): >PO42_HUMAN
PELFNGAEKKRKRTSI

SEQ ID NO: 27755 - protein, 16 aa, Homo sapiens
  ( 339 )...( 354 ): >PO42_HUMAN
ELFNGAEKKRKRTSIA

SEQ ID NO: 27756 - protein, 16 aa, Homo sapiens
  ( 340 )...( 355 ): >PO42_HUMAN
LFNGAEKKRKRTSIAA

SEQ ID NO: 27757 - protein, 16 aa, Homo sapiens
  ( 341 )...( 356 ): >PO42_HUMAN
FNGAEKKRKRTSIAAP

SEQ ID NO: 27758 - protein, 16 aa, Homo sapiens
  ( 342 )...( 357 ): >PO42_HUMAN
NGAEKKRKRTSIAAPE

SEQ ID NO: 27759 - protein, 16 aa, Homo sapiens
  ( 343 )...( 358 ): >PO42_HUMAN
GAEKKRKRTSIAAPEK

SEQ ID NO: 27760 - protein, 16 aa, Homo sapiens
  ( 344 )...( 359 ): >PO42_HUMAN
AEKKRKRTSIAAPEKR

SEQ ID NO: 27761 - protein, 16 aa, Homo sapiens
  ( 346 )...( 361 ): >PO42_HUMAN
KKRKRTSIAAPEKRSL

SEQ ID NO: 27762 - protein, 16 aa, Homo sapiens
  ( 347 )...( 362 ): >PO42_HUMAN
KRKRTSIAAPEKRSLE

SEQ ID NO: 27763 - protein, 16 aa, Homo sapiens
  ( 348 )...( 363 ): >PO42_HUMAN
RKRTSIAAPEKRSLEA

SEQ ID NO: 27764 - protein, 16 aa, Homo sapiens
  ( 188 )...( 203 ): >PO43_HUMAN
EAFAERFKQRRIKLGV

SEQ ID NO: 27765 - protein, 16 aa, Homo sapiens
  ( 189 )...( 204 ): >PO43_HUMAN
AFAERFKQRRIKLGVT

SEQ ID NO: 27766 - protein, 16 aa, Homo sapiens
  ( 191 )...( 206 ): >PO43_HUMAN
AERFKQRRIKLGVTQA

SEQ ID NO: 27767 - protein, 16 aa, Homo sapiens
  ( 192 )...( 207 ): >PO43_HUMAN
ERFKQRRIKLGVTQAD

SEQ ID NO: 27768 - protein, 16 aa, Homo sapiens
  ( 193 )...( 208 ): >PO43_HUMAN
RFKQRRIKLGVTQADV

SEQ ID NO: 27769 - protein, 16 aa, Homo sapiens
  ( 194 )...( 209 ): >PO43_HUMAN
FKQRRIKLGVTQADVG

SEQ ID NO: 27770 - protein, 16 aa, Homo sapiens
  ( 195 )...( 210 ): >PO43_HUMAN
KQRRIKLGVTQADVGA

SEQ ID NO: 27771 - protein, 16 aa, Homo sapiens
  ( 267 )...( 282 ): >PO43_HUMAN
ELFNGSERKRKRTSIA

SEQ ID NO: 27772 - protein, 16 aa, Homo sapiens
  ( 268 )...( 283 ): >PO43_HUMAN
LFNGSERKRKRTSIAA

SEQ ID NO: 27773 - protein, 16 aa, Homo sapiens
  ( 269 )...( 284 ): >PO43_HUMAN
FNGSERKRKRTSIAAP

SEQ ID NO: 27774 - protein, 16 aa, Homo sapiens
  ( 270 )...( 285 ): >PO43_HUMAN
NGSERKRKRTSIAAPE

SEQ ID NO: 27775 - protein, 16 aa, Homo sapiens
  ( 271 )...( 286 ): >PO43_HUMAN
GSERKRKRTSIAAPEK

SEQ ID NO: 27776 - protein, 16 aa, Homo sapiens
  ( 275 )...( 290 ): >PO43_HUMAN
KRKRTSIAAPEKRSLE

SEQ ID NO: 27777 - protein, 16 aa, Homo sapiens
  ( 276 )...( 291 ): >PO43_HUMAN
RKRTSIAAPEKRSLEA

SEQ ID NO: 27778 - protein, 16 aa, Homo sapiens
  ( 144 )...( 159 ): >PO51_HUMAN
KELEQFAKLLKQKRIT

SEQ ID NO: 27779 - protein, 16 aa, Homo sapiens
  ( 146 )...( 161 ): >PO51_HUMAN
LEQFAKLLKQKRITLG

SEQ ID NO: 27780 - protein, 16 aa, Homo sapiens
  ( 147 )...( 162 ): >PO51_HUMAN
EQFAKLLKQKRITLGY

SEQ ID NO: 27781 - protein, 16 aa, Homo sapiens
  ( 148 )...( 163 ): >PO51_HUMAN
QFAKLLKQKRITLGYT

SEQ ID NO: 27782 - protein, 16 aa, Homo sapiens
  ( 149 )...( 164 ): >PO51_HUMAN
FAKLLKQKRITLGYTQ

SEQ ID NO: 27783 - protein, 16 aa, Homo sapiens
  ( 150 )...( 165 ): >PO51_HUMAN
AKLLKQKRITLGYTQA

SEQ ID NO: 27784 - protein, 16 aa, Homo sapiens
  ( 151 )...( 166 ): >PO51_HUMAN
KLLKQKRITLGYTQAD

SEQ ID NO: 27785 - protein, 16 aa, Homo sapiens
  ( 190 )...( 205 ): >PO51_HUMAN
LQLSFKNMCKLRPLLQ

SEQ ID NO: 27786 - protein, 16 aa, Homo sapiens
  ( 218 )...( 233 ): >PO51_HUMAN
QEICKAETLVQARKRK

SEQ ID NO: 27787 - protein, 16 aa, Homo sapiens
  ( 219 )...( 234 ): >PO51_HUMAN
EICKAETLVQARKRKR

SEQ ID NO: 27788 - protein, 16 aa, Homo sapiens
  ( 220 )...( 235 ): >PO51_HUMAN
ICKAETLVQARKRKRT

SEQ ID NO: 27789 - protein, 16 aa, Homo sapiens
  ( 221 )...( 236 ): >PO51_HUMAN
CKAETLVQARKRKRTS

SEQ ID NO: 27790 - protein, 16 aa, Homo sapiens
  ( 222 )...( 237 ): >PO51_HUMAN
KAETLVQARKRKRTSI

SEQ ID NO: 27791 - protein, 16 aa, Homo sapiens
  ( 223 )...( 238 ): >PO51_HUMAN
AETLVQARKRKRTSIE

SEQ ID NO: 27792 - protein, 16 aa, Homo sapiens
  ( 224 )...( 239 ): >PO51_HUMAN
ETLVQARKRKRTSIEN

SEQ ID NO: 27793 - protein, 16 aa, Homo sapiens
  ( 144 )...( 159 ): >PO5L_HUMAN
KELEQFAKLLKQKRIT

SEQ ID NO: 27794 - protein, 16 aa, Homo sapiens
  ( 146 )...( 161 ): >PO5L_HUMAN
LEQFAKLLKQKRITLG

SEQ ID NO: 27795 - protein, 16 aa, Homo sapiens
  ( 147 )...( 162 ): >PO5L_HUMAN
EQFAKLLKQKRITLGY

SEQ ID NO: 27796 - protein, 16 aa, Homo sapiens
  ( 148 )...( 163 ): >PO5L_HUMAN
QFAKLLKQKRITLGYT

SEQ ID NO: 27797 - protein, 16 aa, Homo sapiens
  ( 149 )...( 164 ): >PO5L_HUMAN
FAKLLKQKRITLGYTQ

SEQ ID NO: 27798 - protein, 16 aa, Homo sapiens
  ( 150 )...( 165 ): >PO5L_HUMAN
AKLLKQKRITLGYTQA

SEQ ID NO: 27799 - protein, 16 aa, Homo sapiens
  ( 151 )...( 166 ): >PO5L_HUMAN
KLLKQKRITLGYTQAD

SEQ ID NO: 27800 - protein, 16 aa, Homo sapiens
  ( 171 )...( 186 ): >PO5L_HUMAN
LGVLFGKVFSQKTICR

SEQ ID NO: 27801 - protein, 16 aa, Homo sapiens
  ( 189 )...( 204 ): >PO5L_HUMAN
ALQLSFKNICKLRPLL

SEQ ID NO: 27802 - protein, 16 aa, Homo sapiens
  ( 190 )...( 205 ): >PO5L_HUMAN
LQLSFKNICKLRPLLQ

SEQ ID NO: 27803 - protein, 16 aa, Homo sapiens
  ( 218 )...( 233 ): >PO5L_HUMAN
QEICKAETLMQARKRK

SEQ ID NO: 27804 - protein, 16 aa, Homo sapiens
  ( 219 )...( 234 ): >PO5L_HUMAN
EICKAETLMQARKRKR

SEQ ID NO: 27805 - protein, 16 aa, Homo sapiens
  ( 220 )...( 235 ): >PO5L_HUMAN
ICKAETLMQARKRKRT

SEQ ID NO: 27806 - protein, 16 aa, Homo sapiens
  ( 221 )...( 236 ): >PO5L_HUMAN
CKAETLMQARKRKRTS

SEQ ID NO: 27807 - protein, 16 aa, Homo sapiens
  ( 222 )...( 237 ): >PO5L_HUMAN
KAETLMQARKRKRTSI

SEQ ID NO: 27808 - protein, 16 aa, Homo sapiens
  ( 223 )...( 238 ): >PO5L_HUMAN
AETLMQARKRKRTSIE

SEQ ID NO: 27809 - protein, 16 aa, Homo sapiens
  ( 144 )...( 159 ): >PO5M_HUMAN
KELEQFAKLLKQKRIT

SEQ ID NO: 27810 - protein, 16 aa, Homo sapiens
  ( 146 )...( 161 ): >PO5M_HUMAN
LEQFAKLLKQKRITLG

SEQ ID NO: 27811 - protein, 16 aa, Homo sapiens
  ( 147 )...( 162 ): >PO5M_HUMAN
EQFAKLLKQKRITLGY

SEQ ID NO: 27812 - protein, 16 aa, Homo sapiens
  ( 148 )...( 163 ): >PO5M_HUMAN
QFAKLLKQKRITLGYT

SEQ ID NO: 27813 - protein, 16 aa, Homo sapiens
  ( 149 )...( 164 ): >PO5M_HUMAN
FAKLLKQKRITLGYTQ

SEQ ID NO: 27814 - protein, 16 aa, Homo sapiens
  ( 150 )...( 165 ): >PO5M_HUMAN
AKLLKQKRITLGYTQA

SEQ ID NO: 27815 - protein, 16 aa, Homo sapiens
  ( 151 )...( 166 ): >PO5M_HUMAN
KLLKQKRITLGYTQAD

SEQ ID NO: 27816 - protein, 16 aa, Homo sapiens
  ( 190 )...( 205 ): >PO5M_HUMAN
LQLSFKNMCKLRPLLQ

SEQ ID NO: 27817 - protein, 16 aa, Homo sapiens
  ( 218 )...( 233 ): >PO5M_HUMAN
QEICKAETLMQARKRK

SEQ ID NO: 27818 - protein, 16 aa, Homo sapiens
  ( 219 )...( 234 ): >PO5M_HUMAN
EICKAETLMQARKRKR

SEQ ID NO: 27819 - protein, 16 aa, Homo sapiens
  ( 220 )...( 235 ): >PO5M_HUMAN
ICKAETLMQARKRKRT

SEQ ID NO: 27820 - protein, 16 aa, Homo sapiens
  ( 221 )...( 236 ): >PO5M_HUMAN
CKAETLMQARKRKRTS

SEQ ID NO: 27821 - protein, 16 aa, Homo sapiens
  ( 222 )...( 237 ): >PO5M_HUMAN
KAETLMQARKRKRTSI

SEQ ID NO: 27822 - protein, 16 aa, Homo sapiens
  ( 223 )...( 238 ): >PO5M_HUMAN
AETLMQARKRKRTSIE

SEQ ID NO: 27823 - protein, 16 aa, Homo sapiens
  ( 137 )...( 152 ): >PO5N_HUMAN
KELEQFAKLLKQKRIT

SEQ ID NO: 27824 - protein, 16 aa, Homo sapiens
  ( 139 )...( 154 ): >PO5N_HUMAN
LEQFAKLLKQKRITLG

SEQ ID NO: 27825 - protein, 16 aa, Homo sapiens
  ( 140 )...( 155 ): >PO5N_HUMAN
EQFAKLLKQKRITLGY

SEQ ID NO: 27826 - protein, 16 aa, Homo sapiens
  ( 141 )...( 156 ): >PO5N_HUMAN
QFAKLLKQKRITLGYT

SEQ ID NO: 27827 - protein, 16 aa, Homo sapiens
  ( 142 )...( 157 ): >PO5N_HUMAN
FAKLLKQKRITLGYTQ

SEQ ID NO: 27828 - protein, 16 aa, Homo sapiens
  ( 143 )...( 158 ): >PO5N_HUMAN
AKLLKQKRITLGYTQA

SEQ ID NO: 27829 - protein, 16 aa, Homo sapiens
  ( 144 )...( 159 ): >PO5N_HUMAN
KLLKQKRITLGYTQAD

SEQ ID NO: 27830 - protein, 16 aa, Homo sapiens
  ( 183 )...( 198 ): >PO5N_HUMAN
LQLSFKNMCKLRPLLQ

SEQ ID NO: 27831 - protein, 16 aa, Homo sapiens
  ( 211 )...( 226 ): >PO5N_HUMAN
QETCKAETLLQARKRK

SEQ ID NO: 27832 - protein, 16 aa, Homo sapiens
  ( 212 )...( 227 ): >PO5N_HUMAN
ETCKAETLLQARKRKR

SEQ ID NO: 27833 - protein, 16 aa, Homo sapiens
  ( 213 )...( 228 ): >PO5N_HUMAN
TCKAETLLQARKRKRT

SEQ ID NO: 27834 - protein, 16 aa, Homo sapiens
  ( 214 )...( 229 ): >PO5N_HUMAN
CKAETLLQARKRKRTS

SEQ ID NO: 27835 - protein, 16 aa, Homo sapiens
  ( 215 )...( 230 ): >PO5N_HUMAN
KAETLLQARKRKRTSI

SEQ ID NO: 27836 - protein, 16 aa, Homo sapiens
  ( 216 )...( 231 ): >PO5N_HUMAN
AETLLQARKRKRTSIE

SEQ ID NO: 27837 - protein, 16 aa, Homo sapiens
  ( 217 )...( 232 ): >PO5N_HUMAN
ETLLQARKRKRTSIEN

SEQ ID NO: 27838 - protein, 16 aa, Homo sapiens
  ( 149 )...( 164 ): >PO61_HUMAN
EFAKNFKIRRLSLGLT

SEQ ID NO: 27839 - protein, 16 aa, Homo sapiens
  ( 150 )...( 165 ): >PO61_HUMAN
FAKNFKIRRLSLGLTQ

SEQ ID NO: 27840 - protein, 16 aa, Homo sapiens
  ( 151 )...( 166 ): >PO61_HUMAN
AKNFKIRRLSLGLTQT

SEQ ID NO: 27841 - protein, 16 aa, Homo sapiens
  ( 152 )...( 167 ): >PO61_HUMAN
KNFKIRRLSLGLTQTQ

SEQ ID NO: 27842 - protein, 16 aa, Homo sapiens
  ( 153 )...( 168 ): >PO61_HUMAN
NFKIRRLSLGLTQTQV

SEQ ID NO: 27843 - protein, 16 aa, Homo sapiens
  ( 154 )...( 169 ): >PO61_HUMAN
FKIRRLSLGLTQTQVG

SEQ ID NO: 27844 - protein, 16 aa, Homo sapiens
  ( 155 )...( 170 ): >PO61_HUMAN
KIRRLSLGLTQTQVGQ

SEQ ID NO: 27845 - protein, 16 aa, Homo sapiens
  ( 222 )...( 237 ): >PO61_HUMAN
NLMEFVGGEPSKKRKR

SEQ ID NO: 27846 - protein, 16 aa, Homo sapiens
  ( 223 )...( 238 ): >PO61_HUMAN
LMEFVGGEPSKKRKRR

SEQ ID NO: 27847 - protein, 16 aa, Homo sapiens
  ( 224 )...( 239 ): >PO61_HUMAN
MEFVGGEPSKKRKRRT

SEQ ID NO: 27848 - protein, 16 aa, Homo sapiens
  ( 225 )...( 240 ): >PO61_HUMAN
EFVGGEPSKKRKRRTS

SEQ ID NO: 27849 - protein, 16 aa, Homo sapiens
  ( 226 )...( 241 ): >PO61_HUMAN
FVGGEPSKKRKRRTSF

SEQ ID NO: 27850 - protein, 16 aa, Homo sapiens
  ( 227 )...( 242 ): >PO61_HUMAN
VGGEPSKKRKRRTSFT

SEQ ID NO: 27851 - protein, 16 aa, Homo sapiens
  ( 228 )...( 243 ): >PO61_HUMAN
GGEPSKKRKRRTSFTP

SEQ ID NO: 27852 - protein, 16 aa, Homo sapiens
  ( 234 )...( 249 ): >PO61_HUMAN
KRKRRTSFTPQAIEAL

SEQ ID NO: 27853 - protein, 16 aa, Homo sapiens
  ( 235 )...( 250 ): >PO61_HUMAN
RKRRTSFTPQAIEALN

SEQ ID NO: 27854 - protein, 16 aa, Homo sapiens
  ( 286 )...( 301 ): >PO61_HUMAN
RQTLKNTSKLNVFQIP

SEQ ID NO: 27855 - protein, 16 aa, Homo sapiens
  ( 402 )...( 417 ): >PRD4_HUMAN
IESRARLSLPKQLVLR

SEQ ID NO: 27856 - protein, 16 aa, Homo sapiens
  ( 403 )...( 418 ): >PRD4_HUMAN
ESRARLSLPKQLVLRQ

SEQ ID NO: 27857 - protein, 16 aa, Homo sapiens
  ( 404 )...( 419 ): >PRD4_HUMAN
SRARLSLPKQLVLRQS

SEQ ID NO: 27858 - protein, 16 aa, Homo sapiens
  ( 405 )...( 420 ): >PRD4_HUMAN
RARLSLPKQLVLRQSI

SEQ ID NO: 27859 - protein, 16 aa, Homo sapiens
  ( 406 )...( 421 ): >PRD4_HUMAN
ARLSLPKQLVLRQSIV

SEQ ID NO: 27860 - protein, 16 aa, Homo sapiens
  ( 407 )...( 422 ): >PRD4_HUMAN
RLSLPKQLVLRQSIVG

SEQ ID NO: 27861 - protein, 16 aa, Homo sapiens
  ( 634 )...( 649 ): >PRD4_HUMAN
RTHLKIHTGQKNYRCT

SEQ ID NO: 27862 - protein, 16 aa, Homo sapiens
  ( 13 )...( 28 ): >PRD5_HUMAN
KSSRVQDGMGLYTARR

SEQ ID NO: 27863 - protein, 16 aa, Homo sapiens
  ( 15 )...( 30 ): >PRD5_HUMAN
SRVQDGMGLYTARRVR

SEQ ID NO: 27864 - protein, 16 aa, Homo sapiens
  ( 16 )...( 31 ): >PRD5_HUMAN
RVQDGMGLYTARRVRK

SEQ ID NO: 27865 - protein, 16 aa, Homo sapiens
  ( 17 )...( 32 ): >PRD5_HUMAN
VQDGMGLYTARRVRKG

SEQ ID NO: 27866 - protein, 16 aa, Homo sapiens
  ( 19 )...( 34 ): >PRD5_HUMAN
DGMGLYTARRVRKGEK

SEQ ID NO: 27867 - protein, 16 aa, Homo sapiens
  ( 20 )...( 35 ): >PRD5_HUMAN
GMGLYTARRVRKGEKF

SEQ ID NO: 27868 - protein, 16 aa, Homo sapiens
  ( 21 )...( 36 ): >PRD5_HUMAN
MGLYTARRVRKGEKFG

SEQ ID NO: 27869 - protein, 16 aa, Homo sapiens
  ( 22 )...( 37 ): >PRD5_HUMAN
GLYTARRVRKGEKFGP

SEQ ID NO: 27870 - protein, 16 aa, Homo sapiens
  ( 23 )...( 38 ): >PRD5_HUMAN
LYTARRVRKGEKFGPF

SEQ ID NO: 27871 - protein, 16 aa, Homo sapiens
  ( 24 )...( 39 ): >PRD5_HUMAN
YTARRVRKGEKFGPFA

SEQ ID NO: 27872 - protein, 16 aa, Homo sapiens
  ( 25 )...( 40 ): >PRD5_HUMAN
TARRVRKGEKFGPFAG

SEQ ID NO: 27873 - protein, 16 aa, Homo sapiens
  ( 26 )...( 41 ): >PRD5_HUMAN
ARRVRKGEKFGPFAGE

SEQ ID NO: 27874 - protein, 16 aa, Homo sapiens
  ( 27 )...( 42 ): >PRD5_HUMAN
RRVRKGEKFGPFAGEK

SEQ ID NO: 27875 - protein, 16 aa, Homo sapiens
  ( 28 )...( 43 ): >PRD5_HUMAN
RVRKGEKFGPFAGEKR

SEQ ID NO: 27876 - protein, 16 aa, Homo sapiens
  ( 29 )...( 44 ): >PRD5_HUMAN
VRKGEKFGPFAGEKRM

SEQ ID NO: 27877 - protein, 16 aa, Homo sapiens
  ( 146 )...( 161 ): >PRD5_HUMAN
VENSRRQSTAGRKDRL

SEQ ID NO: 27878 - protein, 16 aa, Homo sapiens
  ( 203 )...( 218 ): >PRD5_HUMAN
NCGKKFPVKQALQRHV

SEQ ID NO: 27879 - protein, 16 aa, Homo sapiens
  ( 204 )...( 219 ): >PRD5_HUMAN
CGKKFPVKQALQRHVL

SEQ ID NO: 27880 - protein, 16 aa, Homo sapiens
  ( 205 )...( 220 ): >PRD5_HUMAN
GKKFPVKQALQRHVLQ

SEQ ID NO: 27881 - protein, 16 aa, Homo sapiens
  ( 206 )...( 221 ): >PRD5_HUMAN
KKFPVKQALQRHVLQC

SEQ ID NO: 27882 - protein, 16 aa, Homo sapiens
  ( 207 )...( 222 ): >PRD5_HUMAN
KFPVKQALQRHVLQCT

SEQ ID NO: 27883 - protein, 16 aa, Homo sapiens
  ( 209 )...( 224 ): >PRD5_HUMAN
PVKQALQRHVLQCTAK

SEQ ID NO: 27884 - protein, 16 aa, Homo sapiens
  ( 267 )...( 282 ): >PRD5_HUMAN
DSCGKRLKSKDALKRH

SEQ ID NO: 27885 - protein, 16 aa, Homo sapiens
  ( 268 )...( 283 ): >PRD5_HUMAN
SCGKRLKSKDALKRHQ

SEQ ID NO: 27886 - protein, 16 aa, Homo sapiens
  ( 410 )...( 425 ): >PRD5_HUMAN
KALFRTPFSLQRHLLI

SEQ ID NO: 27887 - protein, 16 aa, Homo sapiens
  ( 467 )...( 482 ): >PRD5_HUMAN
NKAFVTPSVLRSHKKT

SEQ ID NO: 27888 - protein, 16 aa, Homo sapiens
  ( 580 )...( 595 ): >PRD5_HUMAN
LAFSLKKMLIRHKMTH

SEQ ID NO: 27889 - protein, 16 aa, Homo sapiens
  ( 93 )...( 108 ): >PRD6_HUMAN
RAAQGHVAHAGRTLSR

SEQ ID NO: 27890 - protein, 16 aa, Homo sapiens
  ( 95 )...( 110 ): >PRD6_HUMAN
AQGHVAHAGRTLSRTR

SEQ ID NO: 27891 - protein, 16 aa, Homo sapiens
  ( 487 )...( 502 ): >PRD6_HUMAN
KCGQCFKTFTQRILLQ

SEQ ID NO: 27892 - protein, 16 aa, Homo sapiens
  ( 131 )...( 146 ): >PRD7_HUMAN
RQIFYRTCRVIRPGCE

SEQ ID NO: 27893 - protein, 16 aa, Homo sapiens
  ( 159 )...( 174 ): >PRD7_HUMAN
LGIKWGSKWKKELMAG

SEQ ID NO: 27894 - protein, 16 aa, Homo sapiens
  ( 160 )...( 175 ): >PRD7_HUMAN
GIKWGSKWKKELMAGR

SEQ ID NO: 27895 - protein, 16 aa, Homo sapiens
  ( 161 )...( 176 ): >PRD7_HUMAN
IKWGSKWKKELMAGRE

SEQ ID NO: 27896 - protein, 16 aa, Homo sapiens
  ( 244 )...( 259 ): >PRD7_HUMAN
KTKGQEIKERSKLLNK

SEQ ID NO: 27897 - protein, 16 aa, Homo sapiens
  ( 245 )...( 260 ): >PRD7_HUMAN
TKGQEIKERSKLLNKR

SEQ ID NO: 27898 - protein, 16 aa, Homo sapiens
  ( 246 )...( 261 ): >PRD7_HUMAN
KGQEIKERSKLLNKRT

SEQ ID NO: 27899 - protein, 16 aa, Homo sapiens
  ( 293 )...( 308 ): >PRD7_HUMAN
RTGQKVNPGNTGKLFV

SEQ ID NO: 27900 - protein, 16 aa, Homo sapiens
  ( 305 )...( 320 ): >PRD7_HUMAN
KLFVGVGISRIAKVKY

SEQ ID NO: 27901 - protein, 16 aa, Homo sapiens
  ( 379 )...( 394 ): >PRD7_HUMAN
CERGFSRKSVLLIHQR

SEQ ID NO: 27902 - protein, 16 aa, Homo sapiens
  ( 380 )...( 395 ): >PRD7_HUMAN
ERGFSRKSVLLIHQRT

SEQ ID NO: 27903 - protein, 16 aa, Homo sapiens
  ( 381 )...( 396 ): >PRD7_HUMAN
RGFSRKSVLLIHQRTH

SEQ ID NO: 27904 - protein, 16 aa, Homo sapiens
  ( 382 )...( 397 ): >PRD7_HUMAN
GFSRKSVLLIHQRTHR

SEQ ID NO: 27905 - protein, 16 aa, Homo sapiens
  ( 383 )...( 398 ): >PRD7_HUMAN
FSRKSVLLIHQRTHRG

SEQ ID NO: 27906 - protein, 16 aa, Homo sapiens
  ( 385 )...( 400 ): >PRD7_HUMAN
RKSVLLIHQRTHRGEA

SEQ ID NO: 27907 - protein, 16 aa, Homo sapiens
  ( 390 )...( 405 ): >PRD7_HUMAN
LIHQRTHRGEAPVCRK

SEQ ID NO: 27908 - protein, 16 aa, Homo sapiens
  ( 137 )...( 152 ): >PRD9_HUMAN
RQIFYRTCRVIRPGCE

SEQ ID NO: 27909 - protein, 16 aa, Homo sapiens
  ( 245 )...( 260 ): >PRD9_HUMAN
KTKGQEIKERSKLLNK

SEQ ID NO: 27910 - protein, 16 aa, Homo sapiens
  ( 246 )...( 261 ): >PRD9_HUMAN
TKGQEIKERSKLLNKR

SEQ ID NO: 27911 - protein, 16 aa, Homo sapiens
  ( 247 )...( 262 ): >PRD9_HUMAN
KGQEIKERSKLLNKRT

SEQ ID NO: 27912 - protein, 16 aa, Homo sapiens
  ( 294 )...( 309 ): >PRD9_HUMAN
RTGQKVNPGNTGKLFV

SEQ ID NO: 27913 - protein, 16 aa, Homo sapiens
  ( 306 )...( 321 ): >PRD9_HUMAN
KLFVGVGISRIAKVKY

SEQ ID NO: 27914 - protein, 16 aa, Homo sapiens
  ( 353 )...( 368 ): >PRD9_HUMAN
GRGFSWKSHLLIHQRI

SEQ ID NO: 27915 - protein, 16 aa, Homo sapiens
  ( 408 )...( 423 ): >PRD9_HUMAN
CGRGFSRQSVLLTHQR

SEQ ID NO: 27916 - protein, 16 aa, Homo sapiens
  ( 409 )...( 424 ): >PRD9_HUMAN
GRGFSRQSVLLTHQRR

SEQ ID NO: 27917 - protein, 16 aa, Homo sapiens
  ( 436 )...( 451 ): >PRD9_HUMAN
CGRGFSRQSVLLTHQR

SEQ ID NO: 27918 - protein, 16 aa, Homo sapiens
  ( 437 )...( 452 ): >PRD9_HUMAN
GRGFSRQSVLLTHQRR

SEQ ID NO: 27919 - protein, 16 aa, Homo sapiens
  ( 109 )...( 124 ): >PRDA_HUMAN
IPNRPVLTRARASLPL

SEQ ID NO: 27920 - protein, 16 aa, Homo sapiens
  ( 110 )...( 125 ): >PRDA_HUMAN
PNRPVLTRARASLPLV

SEQ ID NO: 27921 - protein, 16 aa, Homo sapiens
  ( 111 )...( 126 ): >PRDA_HUMAN
NRPVLTRARASLPLVL

SEQ ID NO: 27922 - protein, 16 aa, Homo sapiens
  ( 112 )...( 127 ): >PRDA_HUMAN
RPVLTRARASLPLVLY

SEQ ID NO: 27923 - protein, 16 aa, Homo sapiens
  ( 125 )...( 140 ): >PRDA_HUMAN
VLYIDRFLGGVFSKRR

SEQ ID NO: 27924 - protein, 16 aa, Homo sapiens
  ( 126 )...( 141 ): >PRDA_HUMAN
LYIDRFLGGVFSKRRI

SEQ ID NO: 27925 - protein, 16 aa, Homo sapiens
  ( 127 )...( 142 ): >PRDA_HUMAN
YIDRFLGGVFSKRRIP

SEQ ID NO: 27926 - protein, 16 aa, Homo sapiens
  ( 128 )...( 143 ): >PRDA_HUMAN
IDRFLGGVFSKRRIPK

SEQ ID NO: 27927 - protein, 16 aa, Homo sapiens
  ( 130 )...( 145 ): >PRDA_HUMAN
RFLGGVFSKRRIPKRT

SEQ ID NO: 27928 - protein, 16 aa, Homo sapiens
  ( 131 )...( 146 ): >PRDA_HUMAN
FLGGVFSKRRIPKRTQ

SEQ ID NO: 27929 - protein, 16 aa, Homo sapiens
  ( 132 )...( 147 ): >PRDA_HUMAN
LGGVFSKRRIPKRTQF

SEQ ID NO: 27930 - protein, 16 aa, Homo sapiens
  ( 133 )...( 148 ): >PRDA_HUMAN
GGVFSKRRIPKRTQFG

SEQ ID NO: 27931 - protein, 16 aa, Homo sapiens
  ( 134 )...( 149 ): >PRDA_HUMAN
GVFSKRRIPKRTQFGP

SEQ ID NO: 27932 - protein, 16 aa, Homo sapiens
  ( 135 )...( 150 ): >PRDA_HUMAN
VFSKRRIPKRTQFGPV

SEQ ID NO: 27933 - protein, 16 aa, Homo sapiens
  ( 137 )...( 152 ): >PRDA_HUMAN
SKRRIPKRTQFGPVEG

SEQ ID NO: 27934 - protein, 16 aa, Homo sapiens
  ( 138 )...( 153 ): >PRDA_HUMAN
KRRIPKRTQFGPVEGP

SEQ ID NO: 27935 - protein, 16 aa, Homo sapiens
  ( 139 )...( 154 ): >PRDA_HUMAN
RRIPKRTQFGPVEGPL

SEQ ID NO: 27936 - protein, 16 aa, Homo sapiens
  ( 293 )...( 308 ): >PRDA_HUMAN
EKLDVFSRTRGRGRGR

SEQ ID NO: 27937 - protein, 16 aa, Homo sapiens
  ( 294 )...( 309 ): >PRDA_HUMAN
KLDVFSRTRGRGRGRG

SEQ ID NO: 27938 - protein, 16 aa, Homo sapiens
  ( 295 )...( 310 ): >PRDA_HUMAN
LDVFSRTRGRGRGRGK

SEQ ID NO: 27939 - protein, 16 aa, Homo sapiens
  ( 314 )...( 329 ): >PRDA_HUMAN
GPGRRPGRPPKFIRLE

SEQ ID NO: 27940 - protein, 16 aa, Homo sapiens
  ( 316 )...( 331 ): >PRDA_HUMAN
GRRPGRPPKFIRLEIT

SEQ ID NO: 27941 - protein, 16 aa, Homo sapiens
  ( 409 )...( 424 ): >PRDA_HUMAN
QSTLTADDMRRAKRIR

SEQ ID NO: 27942 - protein, 16 aa, Homo sapiens
  ( 410 )...( 425 ): >PRDA_HUMAN
STLTADDMRRAKRIRL

SEQ ID NO: 27943 - protein, 16 aa, Homo sapiens
  ( 587 )...( 602 ): >PRDA_HUMAN
LCSTCGKQFKRKDKLR

SEQ ID NO: 27944 - protein, 16 aa, Homo sapiens
  ( 618 )...( 633 ): >PRDA_HUMAN
ADRISRSKTFKPRITS

SEQ ID NO: 27945 - protein, 16 aa, Homo sapiens
  ( 619 )...( 634 ): >PRDA_HUMAN
DRISRSKTFKPRITST

SEQ ID NO: 27946 - protein, 16 aa, Homo sapiens
  ( 620 )...( 635 ): >PRDA_HUMAN
RISRSKTFKPRITSTD

SEQ ID NO: 27947 - protein, 16 aa, Homo sapiens
  ( 642 )...( 657 ): >PRDA_HUMAN
KCRLCMMGFRRRGMLV

SEQ ID NO: 27948 - protein, 16 aa, Homo sapiens
  ( 644 )...( 659 ): >PRDA_HUMAN
RLCMMGFRRRGMLVNH

SEQ ID NO: 27949 - protein, 16 aa, Homo sapiens
  ( 647 )...( 662 ): >PRDA_HUMAN
MMGFRRRGMLVNHLSK

SEQ ID NO: 27950 - protein, 16 aa, Homo sapiens
  ( 692 )...( 707 ): >PRDA_HUMAN
DKVYKSASKRKAHILK

SEQ ID NO: 27951 - protein, 16 aa, Homo sapiens
  ( 696 )...( 711 ): >PRDA_HUMAN
KSASKRKAHILKNHPG

SEQ ID NO: 27952 - protein, 16 aa, Homo sapiens
  ( 753 )...( 768 ): >PRDA_HUMAN
CSKQYSSKTKMVQHIR

SEQ ID NO: 27953 - protein, 16 aa, Homo sapiens
  ( 307 )...( 322 ): >PRDC_HUMAN
AYSQLAGLRAHQKSAR

SEQ ID NO: 27954 - protein, 16 aa, Homo sapiens
  ( 309 )...( 324 ): >PRDC_HUMAN
SQLAGLRAHQKSARHR

SEQ ID NO: 27955 - protein, 16 aa, Homo sapiens
  ( 310 )...( 325 ): >PRDC_HUMAN
QLAGLRAHQKSARHRP

SEQ ID NO: 27956 - protein, 16 aa, Homo sapiens
  ( 311 )...( 326 ): >PRDC_HUMAN
LAGLRAHQKSARHRPP

SEQ ID NO: 27957 - protein, 16 aa, Homo sapiens
  ( 313 )...( 328 ): >PRDC_HUMAN
GLRAHQKSARHRPPST

SEQ ID NO: 27958 - protein, 16 aa, Homo sapiens
  ( 21 )...( 36 ): >PRDD_HUMAN
GLRLGPVPGTFKLGKY

SEQ ID NO: 27959 - protein, 16 aa, Homo sapiens
  ( 22 )...( 37 ): >PRDD_HUMAN
LRLGPVPGTFKLGKYL

SEQ ID NO: 27960 - protein, 16 aa, Homo sapiens
  ( 34 )...( 49 ): >PRDD_HUMAN
GKYLSDRREPGPKKKV

SEQ ID NO: 27961 - protein, 16 aa, Homo sapiens
  ( 36 )...( 51 ): >PRDD_HUMAN
YLSDRREPGPKKKVLT

SEQ ID NO: 27962 - protein, 16 aa, Homo sapiens
  ( 37 )...( 52 ): >PRDD_HUMAN
LSDRREPGPKKKVLTI

SEQ ID NO: 27963 - protein, 16 aa, Homo sapiens
  ( 38 )...( 53 ): >PRDD_HUMAN
SDRREPGPKKKVLTIQ

SEQ ID NO: 27964 - protein, 16 aa, Homo sapiens
  ( 39 )...( 54 ): >PRDD_HUMAN
DRREPGPKKKVLTIQT

SEQ ID NO: 27965 - protein, 16 aa, Homo sapiens
  ( 40 )...( 55 ): >PRDD_HUMAN
RREPGPKKKVLTIQTS

SEQ ID NO: 27966 - protein, 16 aa, Homo sapiens
  ( 45 )...( 60 ): >PRDD_HUMAN
PKKKVLTIQTSAHQVR

SEQ ID NO: 27967 - protein, 16 aa, Homo sapiens
  ( 46 )...( 61 ): >PRDD_HUMAN
KKKVLTIQTSAHQVRM

SEQ ID NO: 27968 - protein, 16 aa, Homo sapiens
  ( 48 )...( 63 ): >PRDD_HUMAN
KVLTIQTSAHQVRMVR

SEQ ID NO: 27969 - protein, 16 aa, Homo sapiens
  ( 252 )...( 267 ): >PRDD_HUMAN
PGKWGQPKKGKEQLDR

SEQ ID NO: 27970 - protein, 16 aa, Homo sapiens
  ( 253 )...( 268 ): >PRDD_HUMAN
GKWGQPKKGKEQLDRA

SEQ ID NO: 27971 - protein, 16 aa, Homo sapiens
  ( 254 )...( 269 ): >PRDD_HUMAN
KWGQPKKGKEQLDRAL

SEQ ID NO: 27972 - protein, 16 aa, Homo sapiens
  ( 586 )...( 601 ): >PRDD_HUMAN
LYCGKLYSRKYGLKIH

SEQ ID NO: 27973 - protein, 16 aa, Homo sapiens
  ( 588 )...( 603 ): >PRDD_HUMAN
CGKLYSRKYGLKIHMR

SEQ ID NO: 27974 - protein, 16 aa, Homo sapiens
  ( 589 )...( 604 ): >PRDD_HUMAN
GKLYSRKYGLKIHMRT

SEQ ID NO: 27975 - protein, 16 aa, Homo sapiens
  ( 592 )...( 607 ): >PRDD_HUMAN
YSRKYGLKIHMRTHTG

SEQ ID NO: 27976 - protein, 16 aa, Homo sapiens
  ( 593 )...( 608 ): >PRDD_HUMAN
SRKYGLKIHMRTHTGY

SEQ ID NO: 27977 - protein, 16 aa, Homo sapiens
  ( 595 )...( 610 ): >PRDD_HUMAN
KYGLKIHMRTHTGYKP

SEQ ID NO: 27978 - protein, 16 aa, Homo sapiens
  ( 597 )...( 612 ): >PRDD_HUMAN
GLKIHMRTHTGYKPLK

SEQ ID NO: 27979 - protein, 16 aa, Homo sapiens
  ( 598 )...( 613 ): >PRDD_HUMAN
LKIHMRTHTGYKPLKC

SEQ ID NO: 27980 - protein, 16 aa, Homo sapiens
  ( 599 )...( 614 ): >PRDD_HUMAN
KIHMRTHTGYKPLKCK

SEQ ID NO: 27981 - protein, 16 aa, Homo sapiens
  ( 600 )...( 615 ): >PRDD_HUMAN
IHMRTHTGYKPLKCKV

SEQ ID NO: 27982 - protein, 16 aa, Homo sapiens
  ( 603 )...( 618 ): >PRDD_HUMAN
RTHTGYKPLKCKVCLR

SEQ ID NO: 27983 - protein, 16 aa, Homo sapiens
  ( 638 )...( 653 ): >PRDD_HUMAN
TPYRCEFCGKVLVRRR

SEQ ID NO: 27984 - protein, 16 aa, Homo sapiens
  ( 644 )...( 659 ): >PRDD_HUMAN
FCGKVLVRRRDLERHV

SEQ ID NO: 27985 - protein, 16 aa, Homo sapiens
  ( 645 )...( 660 ): >PRDD_HUMAN
CGKVLVRRRDLERHVK

SEQ ID NO: 27986 - protein, 16 aa, Homo sapiens
  ( 646 )...( 661 ): >PRDD_HUMAN
GKVLVRRRDLERHVKS

SEQ ID NO: 27987 - protein, 16 aa, Homo sapiens
  ( 657 )...( 672 ): >PRDD_HUMAN
RHVKSRHPGQSLLAKA

SEQ ID NO: 27988 - protein, 16 aa, Homo sapiens
  ( 273 )...( 288 ): >PRDE_HUMAN
FIAKGVRFGPFQGKVV

SEQ ID NO: 27989 - protein, 16 aa, Homo sapiens
  ( 274 )...( 289 ): >PRDE_HUMAN
IAKGVRFGPFQGKVVN

SEQ ID NO: 27990 - protein, 16 aa, Homo sapiens
  ( 494 )...( 509 ): >PRDE_HUMAN
CTKRFTASSILRTHIR

SEQ ID NO: 27991 - protein, 16 aa, Homo sapiens
  ( 495 )...( 510 ): >PRDE_HUMAN
TKRFTASSILRTHIRQ

SEQ ID NO: 27992 - protein, 16 aa, Homo sapiens
  ( 62 )...( 77 ): >PRDF_HUMAN
SKPGWISRSRSGIALR

SEQ ID NO: 27993 - protein, 16 aa, Homo sapiens
  ( 63 )...( 78 ): >PRDF_HUMAN
KPGWISRSRSGIALRA

SEQ ID NO: 27994 - protein, 16 aa, Homo sapiens
  ( 65 )...( 80 ): >PRDF_HUMAN
GWISRSRSGIALRAAR

SEQ ID NO: 27995 - protein, 16 aa, Homo sapiens
  ( 66 )...( 81 ): >PRDF_HUMAN
WISRSRSGIALRAARP

SEQ ID NO: 27996 - protein, 16 aa, Homo sapiens
  ( 67 )...( 82 ): >PRDF_HUMAN
ISRSRSGIALRAARPP

SEQ ID NO: 27997 - protein, 16 aa, Homo sapiens
  ( 107 )...( 122 ): >PRDF_HUMAN
DVVIPRPRVQPMRVAR

SEQ ID NO: 27998 - protein, 16 aa, Homo sapiens
  ( 108 )...( 123 ): >PRDF_HUMAN
VVIPRPRVQPMRVARG

SEQ ID NO: 27999 - protein, 16 aa, Homo sapiens
  ( 109 )...( 124 ): >PRDF_HUMAN
VIPRPRVQPMRVARGG

SEQ ID NO: 28000 - protein, 16 aa, Homo sapiens
  ( 110 )...( 125 ): >PRDF_HUMAN
IPRPRVQPMRVARGGP

SEQ ID NO: 28001 - protein, 16 aa, Homo sapiens
  ( 112 )...( 127 ): >PRDF_HUMAN
RPRVQPMRVARGGPWT

SEQ ID NO: 28002 - protein, 16 aa, Homo sapiens
  ( 379 )...( 394 ): >PRDF_HUMAN
PAGLVRRLSGQQLPCR

SEQ ID NO: 28003 - protein, 16 aa, Homo sapiens
  ( 380 )...( 395 ): >PRDF_HUMAN
AGLVRRLSGQQLPCRS

SEQ ID NO: 28004 - protein, 16 aa, Homo sapiens
  ( 381 )...( 396 ): >PRDF_HUMAN
GLVRRLSGQQLPCRST

SEQ ID NO: 28005 - protein, 16 aa, Homo sapiens
  ( 382 )...( 397 ): >PRDF_HUMAN
LVRRLSGQQLPCRSTL

SEQ ID NO: 28006 - protein, 16 aa, Homo sapiens
  ( 383 )...( 398 ): >PRDF_HUMAN
VRRLSGQQLPCRSTLT

SEQ ID NO: 28007 - protein, 16 aa, Homo sapiens
  ( 384 )...( 399 ): >PRDF_HUMAN
RRLSGQQLPCRSTLTW

SEQ ID NO: 28008 - protein, 16 aa, Homo sapiens
  ( 434 )...( 449 ): >PRDF_HUMAN
QLVKRTQFGPFESRRV

SEQ ID NO: 28009 - protein, 16 aa, Homo sapiens
  ( 435 )...( 450 ): >PRDF_HUMAN
LVKRTQFGPFESRRVA

SEQ ID NO: 28010 - protein, 16 aa, Homo sapiens
  ( 436 )...( 451 ): >PRDF_HUMAN
VKRTQFGPFESRRVAK

SEQ ID NO: 28011 - protein, 16 aa, Homo sapiens
  ( 620 )...( 635 ): >PRDF_HUMAN
SENVATKEQKKKPRRG

SEQ ID NO: 28012 - protein, 16 aa, Homo sapiens
  ( 633 )...( 648 ): >PRDF_HUMAN
RRGRKPKVSKAEQPLV

SEQ ID NO: 28013 - protein, 16 aa, Homo sapiens
  ( 634 )...( 649 ): >PRDF_HUMAN
RGRKPKVSKAEQPLVI

SEQ ID NO: 28014 - protein, 16 aa, Homo sapiens
  ( 635 )...( 650 ): >PRDF_HUMAN
GRKPKVSKAEQPLVIV

SEQ ID NO: 28015 - protein, 16 aa, Homo sapiens
  ( 705 )...( 720 ): >PRDF_HUMAN
QNNTITLKRSLILSSR

SEQ ID NO: 28016 - protein, 16 aa, Homo sapiens
  ( 709 )...( 724 ): >PRDF_HUMAN
ITLKRSLILSSRHGIR

SEQ ID NO: 28017 - protein, 16 aa, Homo sapiens
  ( 710 )...( 725 ): >PRDF_HUMAN
TLKRSLILSSRHGIRR

SEQ ID NO: 28018 - protein, 16 aa, Homo sapiens
  ( 711 )...( 726 ): >PRDF_HUMAN
LKRSLILSSRHGIRRK

SEQ ID NO: 28019 - protein, 16 aa, Homo sapiens
  ( 712 )...( 727 ): >PRDF_HUMAN
KRSLILSSRHGIRRKL

SEQ ID NO: 28020 - protein, 16 aa, Homo sapiens
  ( 713 )...( 728 ): >PRDF_HUMAN
RSLILSSRHGIRRKLI

SEQ ID NO: 28021 - protein, 16 aa, Homo sapiens
  ( 714 )...( 729 ): >PRDF_HUMAN
SLILSSRHGIRRKLIK

SEQ ID NO: 28022 - protein, 16 aa, Homo sapiens
  ( 715 )...( 730 ): >PRDF_HUMAN
LILSSRHGIRRKLIKQ

SEQ ID NO: 28023 - protein, 16 aa, Homo sapiens
  ( 716 )...( 731 ): >PRDF_HUMAN
ILSSRHGIRRKLIKQL

SEQ ID NO: 28024 - protein, 16 aa, Homo sapiens
  ( 717 )...( 732 ): >PRDF_HUMAN
LSSRHGIRRKLIKQLG

SEQ ID NO: 28025 - protein, 16 aa, Homo sapiens
  ( 718 )...( 733 ): >PRDF_HUMAN
SSRHGIRRKLIKQLGE

SEQ ID NO: 28026 - protein, 16 aa, Homo sapiens
  ( 719 )...( 734 ): >PRDF_HUMAN
SRHGIRRKLIKQLGEH

SEQ ID NO: 28027 - protein, 16 aa, Homo sapiens
  ( 722 )...( 737 ): >PRDF_HUMAN
GIRRKLIKQLGEHKRV

SEQ ID NO: 28028 - protein, 16 aa, Homo sapiens
  ( 726 )...( 741 ): >PRDF_HUMAN
KLIKQLGEHKRVYQCN

SEQ ID NO: 28029 - protein, 16 aa, Homo sapiens
  ( 994 )...( 1009 ): >PRDF_HUMAN
CKRCQLTFGRGKEYLK

SEQ ID NO: 28030 - protein, 16 aa, Homo sapiens
  ( 996 )...( 1011 ): >PRDF_HUMAN
RCQLTFGRGKEYLKHI

SEQ ID NO: 28031 - protein, 16 aa, Homo sapiens
  ( 1117 )...( 1132 ): >PRDF_HUMAN
CGKGMKTKHALRHHMK

SEQ ID NO: 28032 - protein, 16 aa, Homo sapiens
  ( 1118 )...( 1133 ): >PRDF_HUMAN
GKGMKTKHALRHHMKL

SEQ ID NO: 28033 - protein, 16 aa, Homo sapiens
  ( 1150 )...( 1165 ): >PRDF_HUMAN
AQKVNMLKHCKRHTGI

SEQ ID NO: 28034 - protein, 16 aa, Homo sapiens
  ( 1151 )...( 1166 ): >PRDF_HUMAN
QKVNMLKHCKRHTGIK

SEQ ID NO: 28035 - protein, 16 aa, Homo sapiens
  ( 1152 )...( 1167 ): >PRDF_HUMAN
KVNMLKHCKRHTGIKD

SEQ ID NO: 28036 - protein, 16 aa, Homo sapiens
  ( 1231 )...( 1246 ): >PRDF_HUMAN
GTKVSTRASMSRHMRR

SEQ ID NO: 28037 - protein, 16 aa, Homo sapiens
  ( 1287 )...( 1302 ): >PRDF_HUMAN
LAEGKHGKAAKRSHKR

SEQ ID NO: 28038 - protein, 16 aa, Homo sapiens
  ( 1 )...( 16 ): >PRDG_HUMAN
MRSKARARKLAKSDGD

SEQ ID NO: 28039 - protein, 16 aa, Homo sapiens
  ( 2 )...( 17 ): >PRDG_HUMAN
RSKARARKLAKSDGDV

SEQ ID NO: 28040 - protein, 16 aa, Homo sapiens
  ( 3 )...( 18 ): >PRDG_HUMAN
SKARARKLAKSDGDVV

SEQ ID NO: 28041 - protein, 16 aa, Homo sapiens
  ( 4 )...( 19 ): >PRDG_HUMAN
KARARKLAKSDGDVVN

SEQ ID NO: 28042 - protein, 16 aa, Homo sapiens
  ( 241 )...( 256 ): >PRDG_HUMAN
SKLDLRRHKKYTCGSV

SEQ ID NO: 28043 - protein, 16 aa, Homo sapiens
  ( 242 )...( 257 ): >PRDG_HUMAN
KLDLRRHKKYTCGSVG

SEQ ID NO: 28044 - protein, 16 aa, Homo sapiens
  ( 243 )...( 258 ): >PRDG_HUMAN
LDLRRHKKYTCGSVGA

SEQ ID NO: 28045 - protein, 16 aa, Homo sapiens
  ( 245 )...( 260 ): >PRDG_HUMAN
LRRHKKYTCGSVGAAL

SEQ ID NO: 28046 - protein, 16 aa, Homo sapiens
  ( 350 )...( 365 ): >PRDG_HUMAN
SNLQRHIRSQHVGARA

SEQ ID NO: 28047 - protein, 16 aa, Homo sapiens
  ( 352 )...( 367 ): >PRDG_HUMAN
LQRHIRSQHVGARAHA

SEQ ID NO: 28048 - protein, 16 aa, Homo sapiens
  ( 353 )...( 368 ): >PRDG_HUMAN
QRHIRSQHVGARAHAC

SEQ ID NO: 28049 - protein, 16 aa, Homo sapiens
  ( 817 )...( 832 ): >PRDG_HUMAN
GGGREPRKNHVYGERK

SEQ ID NO: 28050 - protein, 16 aa, Homo sapiens
  ( 818 )...( 833 ): >PRDG_HUMAN
GGREPRKNHVYGERKL

SEQ ID NO: 28051 - protein, 16 aa, Homo sapiens
  ( 819 )...( 834 ): >PRDG_HUMAN
GREPRKNHVYGERKLG

SEQ ID NO: 28052 - protein, 16 aa, Homo sapiens
  ( 868 )...( 883 ): >PRDG_HUMAN
SRVEKRKVTDPVGALK

SEQ ID NO: 28053 - protein, 16 aa, Homo sapiens
  ( 872 )...( 887 ): >PRDG_HUMAN
KRKVTDPVGALKEKYL

SEQ ID NO: 28054 - protein, 16 aa, Homo sapiens
  ( 873 )...( 888 ): >PRDG_HUMAN
RKVTDPVGALKEKYLR

SEQ ID NO: 28055 - protein, 16 aa, Homo sapiens
  ( 939 )...( 954 ): >PRDG_HUMAN
LSDPILRKGKERYTCR

SEQ ID NO: 28056 - protein, 16 aa, Homo sapiens
  ( 942 )...( 957 ): >PRDG_HUMAN
PILRKGKERYTCRYCG

SEQ ID NO: 28057 - protein, 16 aa, Homo sapiens
  ( 943 )...( 958 ): >PRDG_HUMAN
ILRKGKERYTCRYCGK

SEQ ID NO: 28058 - protein, 16 aa, Homo sapiens
  ( 944 )...( 959 ): >PRDG_HUMAN
LRKGKERYTCRYCGKI

SEQ ID NO: 28059 - protein, 16 aa, Homo sapiens
  ( 957 )...( 972 ): >PRDG_HUMAN
GKIFPRSANLTRHLRT

SEQ ID NO: 28060 - protein, 16 aa, Homo sapiens
  ( 474 )...( 489 ): >PRDH_HUMAN
GRPLANQGSLRNHMRL

SEQ ID NO: 28061 - protein, 16 aa, Homo sapiens
  ( 500 )...( 515 ): >PRDH_HUMAN
HCGRAFRQRGNLRGHL

SEQ ID NO: 28062 - protein, 16 aa, Homo sapiens
  ( 501 )...( 516 ): >PRDH_HUMAN
CGRAFRQRGNLRGHLR

SEQ ID NO: 28063 - protein, 16 aa, Homo sapiens
  ( 505 )...( 520 ): >PRDH_HUMAN
FRQRGNLRGHLRLHTG

SEQ ID NO: 28064 - protein, 16 aa, Homo sapiens
  ( 506 )...( 521 ): >PRDH_HUMAN
RQRGNLRGHLRLHTGE

SEQ ID NO: 28065 - protein, 16 aa, Homo sapiens
  ( 507 )...( 522 ): >PRDH_HUMAN
QRGNLRGHLRLHTGER

SEQ ID NO: 28066 - protein, 16 aa, Homo sapiens
  ( 508 )...( 523 ): >PRDH_HUMAN
RGNLRGHLRLHTGERP

SEQ ID NO: 28067 - protein, 16 aa, Homo sapiens
  ( 582 )...( 597 ): >PRDH_HUMAN
PQCGRAYTLATKLRRH

SEQ ID NO: 28068 - protein, 16 aa, Homo sapiens
  ( 583 )...( 598 ): >PRDH_HUMAN
QCGRAYTLATKLRRHL

SEQ ID NO: 28069 - protein, 16 aa, Homo sapiens
  ( 584 )...( 599 ): >PRDH_HUMAN
CGRAYTLATKLRRHLK

SEQ ID NO: 28070 - protein, 16 aa, Homo sapiens
  ( 585 )...( 600 ): >PRDH_HUMAN
GRAYTLATKLRRHLKS

SEQ ID NO: 28071 - protein, 16 aa, Homo sapiens
  ( 587 )...( 602 ): >PRDH_HUMAN
AYTLATKLRRHLKSHL

SEQ ID NO: 28072 - protein, 16 aa, Homo sapiens
  ( 44 )...( 59 ): >RBPL_HUMAN
RSSPEHTTILRGGVRR

SEQ ID NO: 28073 - protein, 16 aa, Homo sapiens
  ( 49 )...( 64 ): >RBPL_HUMAN
HTTILRGGVRRCLQQQ

SEQ ID NO: 28074 - protein, 16 aa, Homo sapiens
  ( 50 )...( 65 ): >RBPL_HUMAN
TTILRGGVRRCLQQQC

SEQ ID NO: 28075 - protein, 16 aa, Homo sapiens
  ( 163 )...( 178 ): >RBPL_HUMAN
KRKHFRLVLRLVLRGG

SEQ ID NO: 28076 - protein, 16 aa, Homo sapiens
  ( 165 )...( 180 ): >RBPL_HUMAN
KHFRLVLRLVLRGGRE

SEQ ID NO: 28077 - protein, 16 aa, Homo sapiens
  ( 166 )...( 181 ): >RBPL_HUMAN
HFRLVLRLVLRGGREL

SEQ ID NO: 28078 - protein, 16 aa, Homo sapiens
  ( 167 )...( 182 ): >RBPL_HUMAN
FRLVLRLVLRGGRELG

SEQ ID NO: 28079 - protein, 16 aa, Homo sapiens
  ( 168 )...( 183 ): >RBPL_HUMAN
RLVLRLVLRGGRELGT

SEQ ID NO: 28080 - protein, 16 aa, Homo sapiens
  ( 172 )...( 187 ): >RBPL_HUMAN
RLVLRGGRELGTFHSR

SEQ ID NO: 28081 - protein, 16 aa, Homo sapiens
  ( 175 )...( 190 ): >RBPL_HUMAN
LRGGRELGTFHSRLIK

SEQ ID NO: 28082 - protein, 16 aa, Homo sapiens
  ( 176 )...( 191 ): >RBPL_HUMAN
RGGRELGTFHSRLIKV

SEQ ID NO: 28083 - protein, 16 aa, Homo sapiens
  ( 183 )...( 198 ): >RBPL_HUMAN
TFHSRLIKVISKPSQK

SEQ ID NO: 28084 - protein, 16 aa, Homo sapiens
  ( 185 )...( 200 ): >RBPL_HUMAN
HSRLIKVISKPSQKKQ

SEQ ID NO: 28085 - protein, 16 aa, Homo sapiens
  ( 186 )...( 201 ): >RBPL_HUMAN
SRLIKVISKPSQKKQS

SEQ ID NO: 28086 - protein, 16 aa, Homo sapiens
  ( 187 )...( 202 ): >RBPL_HUMAN
RLIKVISKPSQKKQSL

SEQ ID NO: 28087 - protein, 16 aa, Homo sapiens
  ( 188 )...( 203 ): >RBPL_HUMAN
LIKVISKPSQKKQSLK

SEQ ID NO: 28088 - protein, 16 aa, Homo sapiens
  ( 189 )...( 204 ): >RBPL_HUMAN
IKVISKPSQKKQSLKN

SEQ ID NO: 28089 - protein, 16 aa, Homo sapiens
  ( 190 )...( 205 ): >RBPL_HUMAN
KVISKPSQKKQSLKNT

SEQ ID NO: 28090 - protein, 16 aa, Homo sapiens
  ( 209 )...( 224 ): >RBPL_HUMAN
ISSGSKVSLFNRLRSQ

SEQ ID NO: 28091 - protein, 16 aa, Homo sapiens
  ( 211 )...( 226 ): >RBPL_HUMAN
SGSKVSLFNRLRSQTV

SEQ ID NO: 28092 - protein, 16 aa, Homo sapiens
  ( 212 )...( 227 ): >RBPL_HUMAN
GSKVSLFNRLRSQTVS

SEQ ID NO: 28093 - protein, 16 aa, Homo sapiens
  ( 214 )...( 229 ): >RBPL_HUMAN
KVSLFNRLRSQTVSTR

SEQ ID NO: 28094 - protein, 16 aa, Homo sapiens
  ( 215 )...( 230 ): >RBPL_HUMAN
VSLFNRLRSQTVSTRY

SEQ ID NO: 28095 - protein, 16 aa, Homo sapiens
  ( 216 )...( 231 ): >RBPL_HUMAN
SLFNRLRSQTVSTRYL

SEQ ID NO: 28096 - protein, 16 aa, Homo sapiens
  ( 217 )...( 232 ): >RBPL_HUMAN
LFNRLRSQTVSTRYLS

SEQ ID NO: 28097 - protein, 16 aa, Homo sapiens
  ( 218 )...( 233 ): >RBPL_HUMAN
FNRLRSQTVSTRYLSV

SEQ ID NO: 28098 - protein, 16 aa, Homo sapiens
  ( 282 )...( 297 ): >RBPL_HUMAN
TGITLPPMIIRKVAKQ

SEQ ID NO: 28099 - protein, 16 aa, Homo sapiens
  ( 283 )...( 298 ): >RBPL_HUMAN
GITLPPMIIRKVAKQC

SEQ ID NO: 28100 - protein, 16 aa, Homo sapiens
  ( 284 )...( 299 ): >RBPL_HUMAN
ITLPPMIIRKVAKQCA

SEQ ID NO: 28101 - protein, 16 aa, Homo sapiens
  ( 285 )...( 300 ): >RBPL_HUMAN
TLPPMIIRKVAKQCAL

SEQ ID NO: 28102 - protein, 16 aa, Homo sapiens
  ( 446 )...( 461 ): >RBPL_HUMAN
RWLRAPITIPMSLVRA

SEQ ID NO: 28103 - protein, 16 aa, Homo sapiens
  ( 240 )...( 255 ): >RB_HUMAN
KTAVIPINGSPRTPRR

SEQ ID NO: 28104 - protein, 16 aa, Homo sapiens
  ( 242 )...( 257 ): >RB_HUMAN
AVIPINGSPRTPRRGQ

SEQ ID NO: 28105 - protein, 16 aa, Homo sapiens
  ( 244 )...( 259 ): >RB_HUMAN
IPINGSPRTPRRGQNR

SEQ ID NO: 28106 - protein, 16 aa, Homo sapiens
  ( 246 )...( 261 ): >RB_HUMAN
INGSPRTPRRGQNRSA

SEQ ID NO: 28107 - protein, 16 aa, Homo sapiens
  ( 248 )...( 263 ): >RB_HUMAN
GSPRTPRRGQNRSARI

SEQ ID NO: 28108 - protein, 16 aa, Homo sapiens
  ( 252 )...( 267 ): >RB_HUMAN
TPRRGQNRSARIAKQL

SEQ ID NO: 28109 - protein, 16 aa, Homo sapiens
  ( 412 )...( 427 ): >RB_HUMAN
KESILKRVKDIGYIFK

SEQ ID NO: 28110 - protein, 16 aa, Homo sapiens
  ( 414 )...( 429 ): >RB_HUMAN
SILKRVKDIGYIFKEK

SEQ ID NO: 28111 - protein, 16 aa, Homo sapiens
  ( 416 )...( 431 ): >RB_HUMAN
LKRVKDIGYIFKEKFA

SEQ ID NO: 28112 - protein, 16 aa, Homo sapiens
  ( 418 )...( 433 ): >RB_HUMAN
RVKDIGYIFKEKFAKA

SEQ ID NO: 28113 - protein, 16 aa, Homo sapiens
  ( 441 )...( 456 ): >RB_HUMAN
IGSQRYKLGVRLYYRV

SEQ ID NO: 28114 - protein, 16 aa, Homo sapiens
  ( 442 )...( 457 ): >RB_HUMAN
GSQRYKLGVRLYYRVM

SEQ ID NO: 28115 - protein, 16 aa, Homo sapiens
  ( 447 )...( 462 ): >RB_HUMAN
KLGVRLYYRVMESMLK

SEQ ID NO: 28116 - protein, 16 aa, Homo sapiens
  ( 606 )...( 621 ): >RB_HUMAN
YLSPVRSPKKKGSTTR

SEQ ID NO: 28117 - protein, 16 aa, Homo sapiens
  ( 607 )...( 622 ): >RB_HUMAN
LSPVRSPKKKGSTTRV

SEQ ID NO: 28118 - protein, 16 aa, Homo sapiens
  ( 608 )...( 623 ): >RB_HUMAN
SPVRSPKKKGSTTRVN

SEQ ID NO: 28119 - protein, 16 aa, Homo sapiens
  ( 609 )...( 624 ): >RB_HUMAN
PVRSPKKKGSTTRVNS

SEQ ID NO: 28120 - protein, 16 aa, Homo sapiens
  ( 610 )...( 625 ): >RB_HUMAN
VRSPKKKGSTTRVNST

SEQ ID NO: 28121 - protein, 16 aa, Homo sapiens
  ( 611 )...( 626 ): >RB_HUMAN
RSPKKKGSTTRVNSTA

SEQ ID NO: 28122 - protein, 16 aa, Homo sapiens
  ( 639 )...( 654 ): >RB_HUMAN
QKPLKSTSLSLFYKKV

SEQ ID NO: 28123 - protein, 16 aa, Homo sapiens
  ( 640 )...( 655 ): >RB_HUMAN
KPLKSTSLSLFYKKVY

SEQ ID NO: 28124 - protein, 16 aa, Homo sapiens
  ( 642 )...( 657 ): >RB_HUMAN
LKSTSLSLFYKKVYRL

SEQ ID NO: 28125 - protein, 16 aa, Homo sapiens
  ( 643 )...( 658 ): >RB_HUMAN
KSTSLSLFYKKVYRLA

SEQ ID NO: 28126 - protein, 16 aa, Homo sapiens
  ( 652 )...( 667 ): >RB_HUMAN
KKVYRLAYLRLNTLCE

SEQ ID NO: 28127 - protein, 16 aa, Homo sapiens
  ( 708 )...( 723 ): >RB_HUMAN
MYGICKVKNIDLKFKI

SEQ ID NO: 28128 - protein, 16 aa, Homo sapiens
  ( 709 )...( 724 ): >RB_HUMAN
YGICKVKNIDLKFKII

SEQ ID NO: 28129 - protein, 16 aa, Homo sapiens
  ( 710 )...( 725 ): >RB_HUMAN
GICKVKNIDLKFKIIV

SEQ ID NO: 28130 - protein, 16 aa, Homo sapiens
  ( 761 )...( 776 ): >RB_HUMAN
MQRLKTNILQYASTRP

SEQ ID NO: 28131 - protein, 16 aa, Homo sapiens
  ( 762 )...( 777 ): >RB_HUMAN
QRLKTNILQYASTRPP

SEQ ID NO: 28132 - protein, 16 aa, Homo sapiens
  ( 763 )...( 778 ): >RB_HUMAN
RLKTNILQYASTRPPT

SEQ ID NO: 28133 - protein, 16 aa, Homo sapiens
  ( 818 )...( 833 ): >RB_HUMAN
GLPTPTKMTPRSRILV

SEQ ID NO: 28134 - protein, 16 aa, Homo sapiens
  ( 819 )...( 834 ): >RB_HUMAN
LPTPTKMTPRSRILVS

SEQ ID NO: 28135 - protein, 16 aa, Homo sapiens
  ( 820 )...( 835 ): >RB_HUMAN
PTPTKMTPRSRILVSI

SEQ ID NO: 28136 - protein, 16 aa, Homo sapiens
  ( 821 )...( 836 ): >RB_HUMAN
TPTKMTPRSRILVSIG

SEQ ID NO: 28137 - protein, 16 aa, Homo sapiens
  ( 847 )...( 862 ): >RB_HUMAN
KINQMVCNSDRVLKRS

SEQ ID NO: 28138 - protein, 16 aa, Homo sapiens
  ( 896 )...( 911 ): >RB_HUMAN
KFQQKLAEMTSTRTRM

SEQ ID NO: 28139 - protein, 16 aa, Homo sapiens
  ( 898 )...( 913 ): >RB_HUMAN
QQKLAEMTSTRTRMQK

SEQ ID NO: 28140 - protein, 16 aa, Homo sapiens
  ( 899 )...( 914 ): >RB_HUMAN
QKLAEMTSTRTRMQKQ

SEQ ID NO: 28141 - protein, 16 aa, Homo sapiens
  ( 900 )...( 915 ): >RB_HUMAN
KLAEMTSTRTRMQKQK

SEQ ID NO: 28142 - protein, 16 aa, Homo sapiens
  ( 901 )...( 916 ): >RB_HUMAN
LAEMTSTRTRMQKQKM

SEQ ID NO: 28143 - protein, 16 aa, Homo sapiens
  ( 902 )...( 917 ): >RB_HUMAN
AEMTSTRTRMQKQKMN

SEQ ID NO: 28144 - protein, 16 aa, Homo sapiens
  ( 161 )...( 176 ): >REQN_HUMAN
DIPRRKNRAKGKAYGI

SEQ ID NO: 28145 - protein, 16 aa, Homo sapiens
  ( 162 )...( 177 ): >REQN_HUMAN
IPRRKNRAKGKAYGIG

SEQ ID NO: 28146 - protein, 16 aa, Homo sapiens
  ( 163 )...( 178 ): >REQN_HUMAN
PRRKNRAKGKAYGIGG

SEQ ID NO: 28147 - protein, 16 aa, Homo sapiens
  ( 164 )...( 179 ): >REQN_HUMAN
RRKNRAKGKAYGIGGL

SEQ ID NO: 28148 - protein, 16 aa, Homo sapiens
  ( 165 )...( 180 ): >REQN_HUMAN
RKNRAKGKAYGIGGLR

SEQ ID NO: 28149 - protein, 16 aa, Homo sapiens
  ( 166 )...( 181 ): >REQN_HUMAN
KNRAKGKAYGIGGLRK

SEQ ID NO: 28150 - protein, 16 aa, Homo sapiens
  ( 167 )...( 182 ): >REQN_HUMAN
NRAKGKAYGIGGLRKR

SEQ ID NO: 28151 - protein, 16 aa, Homo sapiens
  ( 168 )...( 183 ): >REQN_HUMAN
RAKGKAYGIGGLRKRQ

SEQ ID NO: 28152 - protein, 16 aa, Homo sapiens
  ( 169 )...( 184 ): >REQN_HUMAN
AKGKAYGIGGLRKRQD

SEQ ID NO: 28153 - protein, 16 aa, Homo sapiens
  ( 170 )...( 185 ): >REQN_HUMAN
KGKAYGIGGLRKRQDT

SEQ ID NO: 28154 - protein, 16 aa, Homo sapiens
  ( 171 )...( 186 ): >REQN_HUMAN
GKAYGIGGLRKRQDTA

SEQ ID NO: 28155 - protein, 16 aa, Homo sapiens
  ( 172 )...( 187 ): >REQN_HUMAN
KAYGIGGLRKRQDTAS

SEQ ID NO: 28156 - protein, 16 aa, Homo sapiens
  ( 204 )...( 219 ): >REQN_HUMAN
LAWVPEAQRKHTAKKA

SEQ ID NO: 28157 - protein, 16 aa, Homo sapiens
  ( 142 )...( 157 ): >REQU_HUMAN
SLGEFPVTNSRARKRI

SEQ ID NO: 28158 - protein, 16 aa, Homo sapiens
  ( 143 )...( 158 ): >REQU_HUMAN
LGEFPVTNSRARKRIL

SEQ ID NO: 28159 - protein, 16 aa, Homo sapiens
  ( 175 )...( 190 ): >REQU_HUMAN
DTPKRRGKGKSKGKGV

SEQ ID NO: 28160 - protein, 16 aa, Homo sapiens
  ( 477 )...( 492 ): >RFX1_HUMAN
AASFGKLIRSVFMGLR

SEQ ID NO: 28161 - protein, 16 aa, Homo sapiens
  ( 478 )...( 493 ): >RFX1_HUMAN
ASFGKLIRSVFMGLRT

SEQ ID NO: 28162 - protein, 16 aa, Homo sapiens
  ( 479 )...( 494 ): >RFX1_HUMAN
SFGKLIRSVFMGLRTR

SEQ ID NO: 28163 - protein, 16 aa, Homo sapiens
  ( 480 )...( 495 ): >RFX1_HUMAN
FGKLIRSVFMGLRTRR

SEQ ID NO: 28164 - protein, 16 aa, Homo sapiens
  ( 481 )...( 496 ): >RFX1_HUMAN
GKLIRSVFMGLRTRRL

SEQ ID NO: 28165 - protein, 16 aa, Homo sapiens
  ( 482 )...( 497 ): >RFX1_HUMAN
KLIRSVFMGLRTRRLG

SEQ ID NO: 28166 - protein, 16 aa, Homo sapiens
  ( 483 )...( 498 ): >RFX1_HUMAN
LIRSVFMGLRTRRLGT

SEQ ID NO: 28167 - protein, 16 aa, Homo sapiens
  ( 484 )...( 499 ): >RFX1_HUMAN
IRSVFMGLRTRRLGTR

SEQ ID NO: 28168 - protein, 16 aa, Homo sapiens
  ( 485 )...( 500 ): >RFX1_HUMAN
RSVFMGLRTRRLGTRG

SEQ ID NO: 28169 - protein, 16 aa, Homo sapiens
  ( 486 )...( 501 ): >RFX1_HUMAN
SVFMGLRTRRLGTRGN

SEQ ID NO: 28170 - protein, 16 aa, Homo sapiens
  ( 487 )...( 502 ): >RFX1_HUMAN
VFMGLRTRRLGTRGNS

SEQ ID NO: 28171 - protein, 16 aa, Homo sapiens
  ( 488 )...( 503 ): >RFX1_HUMAN
FMGLRTRRLGTRGNSK

SEQ ID NO: 28172 - protein, 16 aa, Homo sapiens
  ( 489 )...( 504 ): >RFX1_HUMAN
MGLRTRRLGTRGNSKY

SEQ ID NO: 28173 - protein, 16 aa, Homo sapiens
  ( 490 )...( 505 ): >RFX1_HUMAN
GLRTRRLGTRGNSKYH

SEQ ID NO: 28174 - protein, 16 aa, Homo sapiens
  ( 496 )...( 511 ): >RFX1_HUMAN
LGTRGNSKYHYYGLRI

SEQ ID NO: 28175 - protein, 16 aa, Homo sapiens
  ( 497 )...( 512 ): >RFX1_HUMAN
GTRGNSKYHYYGLRIK

SEQ ID NO: 28176 - protein, 16 aa, Homo sapiens
  ( 505 )...( 520 ): >RFX1_HUMAN
HYYGLRIKASSPLLRL

SEQ ID NO: 28177 - protein, 16 aa, Homo sapiens
  ( 506 )...( 521 ): >RFX1_HUMAN
YYGLRIKASSPLLRLM

SEQ ID NO: 28178 - protein, 16 aa, Homo sapiens
  ( 535 )...( 550 ): >RFX1_HUMAN
SQKQRLKPIQKMEGMT

SEQ ID NO: 28179 - protein, 16 aa, Homo sapiens
  ( 536 )...( 551 ): >RFX1_HUMAN
QKQRLKPIQKMEGMTN

SEQ ID NO: 28180 - protein, 16 aa, Homo sapiens
  ( 537 )...( 552 ): >RFX1_HUMAN
KQRLKPIQKMEGMTNG

SEQ ID NO: 28181 - protein, 16 aa, Homo sapiens
  ( 658 )...( 673 ): >RFX1_HUMAN
AEKRLPKAILVLLSKF

SEQ ID NO: 28182 - protein, 16 aa, Homo sapiens
  ( 660 )...( 675 ): >RFX1_HUMAN
KRLPKAILVLLSKFEP

SEQ ID NO: 28183 - protein, 16 aa, Homo sapiens
  ( 734 )...( 749 ): >RFX1_HUMAN
LRVKVAAAGAFAQTLR

SEQ ID NO: 28184 - protein, 16 aa, Homo sapiens
  ( 735 )...( 750 ): >RFX1_HUMAN
RVKVAAAGAFAQTLRR

SEQ ID NO: 28185 - protein, 16 aa, Homo sapiens
  ( 736 )...( 751 ): >RFX1_HUMAN
VKVAAAGAFAQTLRRY

SEQ ID NO: 28186 - protein, 16 aa, Homo sapiens
  ( 737 )...( 752 ): >RFX1_HUMAN
KVAAAGAFAQTLRRYT

SEQ ID NO: 28187 - protein, 16 aa, Homo sapiens
  ( 747 )...( 762 ): >RFX1_HUMAN
TLRRYTSLNHLAQAAR

SEQ ID NO: 28188 - protein, 16 aa, Homo sapiens
  ( 748 )...( 763 ): >RFX1_HUMAN
LRRYTSLNHLAQAARA

SEQ ID NO: 28189 - protein, 16 aa, Homo sapiens
  ( 749 )...( 764 ): >RFX1_HUMAN
RRYTSLNHLAQAARAV

SEQ ID NO: 28190 - protein, 16 aa, Homo sapiens
  ( 215 )...( 230 ): >RLF_HUMAN
LQMRIKHLLKSNCIPQ

SEQ ID NO: 28191 - protein, 16 aa, Homo sapiens
  ( 339 )...( 354 ): >RLF_HUMAN
RCRQFGVIAKTQQHLF

SEQ ID NO: 28192 - protein, 16 aa, Homo sapiens
  ( 612 )...( 627 ): >RLF_HUMAN
RDRSKKKLLLKGSQKG

SEQ ID NO: 28193 - protein, 16 aa, Homo sapiens
  ( 613 )...( 628 ): >RLF_HUMAN
DRSKKKLLLKGSQKGI

SEQ ID NO: 28194 - protein, 16 aa, Homo sapiens
  ( 614 )...( 629 ): >RLF_HUMAN
RSKKKLLLKGSQKGIC

SEQ ID NO: 28195 - protein, 16 aa, Homo sapiens
  ( 615 )...( 630 ): >RLF_HUMAN
SKKKLLLKGSQKGICP

SEQ ID NO: 28196 - protein, 16 aa, Homo sapiens
  ( 616 )...( 631 ): >RLF_HUMAN
KKKLLLKGSQKGICPK

SEQ ID NO: 28197 - protein, 16 aa, Homo sapiens
  ( 617 )...( 632 ): >RLF_HUMAN
KKLLLKGSQKGICPKS

SEQ ID NO: 28198 - protein, 16 aa, Homo sapiens
  ( 962 )...( 977 ): >RLF_HUMAN
GSTYKNARGMQKHLRK

SEQ ID NO: 28199 - protein, 16 aa, Homo sapiens
  ( 983 )...( 998 ): >RLF_HUMAN
FKPKKIKTKDLFPSLG

SEQ ID NO: 28200 - protein, 16 aa, Homo sapiens
  ( 984 )...( 999 ): >RLF_HUMAN
KPKKIKTKDLFPSLGN

SEQ ID NO: 28201 - protein, 16 aa, Homo sapiens
  ( 1284 )...( 1299 ): >RLF_HUMAN
GREGRGSRRTVAKGNL

SEQ ID NO: 28202 - protein, 16 aa, Homo sapiens
  ( 1285 )...( 1300 ): >RLF_HUMAN
REGRGSRRTVAKGNLC

SEQ ID NO: 28203 - protein, 16 aa, Homo sapiens
  ( 1286 )...( 1301 ): >RLF_HUMAN
EGRGSRRTVAKGNLCY

SEQ ID NO: 28204 - protein, 16 aa, Homo sapiens
  ( 1287 )...( 1302 ): >RLF_HUMAN
GRGSRRTVAKGNLCYI

SEQ ID NO: 28205 - protein, 16 aa, Homo sapiens
  ( 1288 )...( 1303 ): >RLF_HUMAN
RGSRRTVAKGNLCYIL

SEQ ID NO: 28206 - protein, 16 aa, Homo sapiens
  ( 1290 )...( 1305 ): >RLF_HUMAN
SRRTVAKGNLCYILNK

SEQ ID NO: 28207 - protein, 16 aa, Homo sapiens
  ( 1291 )...( 1306 ): >RLF_HUMAN
RRTVAKGNLCYILNKY

SEQ ID NO: 28208 - protein, 16 aa, Homo sapiens
  ( 1342 )...( 1357 ): >RLF_HUMAN
LCLEKDKARTKRELVK

SEQ ID NO: 28209 - protein, 16 aa, Homo sapiens
  ( 1343 )...( 1358 ): >RLF_HUMAN
CLEKDKARTKRELVKC

SEQ ID NO: 28210 - protein, 16 aa, Homo sapiens
  ( 1344 )...( 1359 ): >RLF_HUMAN
LEKDKARTKRELVKCK

SEQ ID NO: 28211 - protein, 16 aa, Homo sapiens
  ( 1346 )...( 1361 ): >RLF_HUMAN
KDKARTKRELVKCKKI

SEQ ID NO: 28212 - protein, 16 aa, Homo sapiens
  ( 1348 )...( 1363 ): >RLF_HUMAN
KARTKRELVKCKKIFA

SEQ ID NO: 28213 - protein, 16 aa, Homo sapiens
  ( 1349 )...( 1364 ): >RLF_HUMAN
ARTKRELVKCKKIFAC

SEQ ID NO: 28214 - protein, 16 aa, Homo sapiens
  ( 1350 )...( 1365 ): >RLF_HUMAN
RTKRELVKCKKIFACK

SEQ ID NO: 28215 - protein, 16 aa, Homo sapiens
  ( 1351 )...( 1366 ): >RLF_HUMAN
TKRELVKCKKIFACKY

SEQ ID NO: 28216 - protein, 16 aa, Homo sapiens
  ( 1478 )...( 1493 ): >RLF_HUMAN
RSQKVANERLLRSEKV

SEQ ID NO: 28217 - protein, 16 aa, Homo sapiens
  ( 1504 )...( 1519 ): >RLF_HUMAN
HQTTRRSFNAKSKKCG

SEQ ID NO: 28218 - protein, 16 aa, Homo sapiens
  ( 1505 )...( 1520 ): >RLF_HUMAN
QTTRRSFNAKSKKCGL

SEQ ID NO: 28219 - protein, 16 aa, Homo sapiens
  ( 1506 )...( 1521 ): >RLF_HUMAN
TTRRSFNAKSKKCGLI

SEQ ID NO: 28220 - protein, 16 aa, Homo sapiens
  ( 1507 )...( 1522 ): >RLF_HUMAN
TRRSFNAKSKKCGLIK

SEQ ID NO: 28221 - protein, 16 aa, Homo sapiens
  ( 1508 )...( 1523 ): >RLF_HUMAN
RRSFNAKSKKCGLIKE

SEQ ID NO: 28222 - protein, 16 aa, Homo sapiens
  ( 1509 )...( 1524 ): >RLF_HUMAN
RSFNAKSKKCGLIKEK

SEQ ID NO: 28223 - protein, 16 aa, Homo sapiens
  ( 1510 )...( 1525 ): >RLF_HUMAN
SFNAKSKKCGLIKEKK

SEQ ID NO: 28224 - protein, 16 aa, Homo sapiens
  ( 1511 )...( 1526 ): >RLF_HUMAN
FNAKSKKCGLIKEKKA

SEQ ID NO: 28225 - protein, 16 aa, Homo sapiens
  ( 1512 )...( 1527 ): >RLF_HUMAN
NAKSKKCGLIKEKKAP

SEQ ID NO: 28226 - protein, 16 aa, Homo sapiens
  ( 1513 )...( 1528 ): >RLF_HUMAN
AKSKKCGLIKEKKAPI

SEQ ID NO: 28227 - protein, 16 aa, Homo sapiens
  ( 1514 )...( 1529 ): >RLF_HUMAN
KSKKCGLIKEKKAPIS

SEQ ID NO: 28228 - protein, 16 aa, Homo sapiens
  ( 1516 )...( 1531 ): >RLF_HUMAN
KKCGLIKEKKAPISFK

SEQ ID NO: 28229 - protein, 16 aa, Homo sapiens
  ( 1517 )...( 1532 ): >RLF_HUMAN
KCGLIKEKKAPISFKT

SEQ ID NO: 28230 - protein, 16 aa, Homo sapiens
  ( 1518 )...( 1533 ): >RLF_HUMAN
CGLIKEKKAPISFKTR

SEQ ID NO: 28231 - protein, 16 aa, Homo sapiens
  ( 1519 )...( 1534 ): >RLF_HUMAN
GLIKEKKAPISFKTRA

SEQ ID NO: 28232 - protein, 16 aa, Homo sapiens
  ( 1877 )...( 1892 ): >RLF_HUMAN
KQLHYLRPVVVLERSK

SEQ ID NO: 28233 - protein, 16 aa, Homo sapiens
  ( 102 )...( 117 ): >RN12_HUMAN
LNSVRQTGNTTRSGQR

SEQ ID NO: 28234 - protein, 16 aa, Homo sapiens
  ( 105 )...( 120 ): >RN12_HUMAN
VRQTGNTTRSGQRGNQ

SEQ ID NO: 28235 - protein, 16 aa, Homo sapiens
  ( 108 )...( 123 ): >RN12_HUMAN
TGNTTRSGQRGNQSWR

SEQ ID NO: 28236 - protein, 16 aa, Homo sapiens
  ( 109 )...( 124 ): >RN12_HUMAN
GNTTRSGQRGNQSWRA

SEQ ID NO: 28237 - protein, 16 aa, Homo sapiens
  ( 110 )...( 125 ): >RN12_HUMAN
NTTRSGQRGNQSWRAV

SEQ ID NO: 28238 - protein, 16 aa, Homo sapiens
  ( 111 )...( 126 ): >RN12_HUMAN
TTRSGQRGNQSWRAVS

SEQ ID NO: 28239 - protein, 16 aa, Homo sapiens
  ( 112 )...( 127 ): >RN12_HUMAN
TRSGQRGNQSWRAVSR

SEQ ID NO: 28240 - protein, 16 aa, Homo sapiens
  ( 113 )...( 128 ): >RN12_HUMAN
RSGQRGNQSWRAVSRT

SEQ ID NO: 28241 - protein, 16 aa, Homo sapiens
  ( 198 )...( 213 ): >RN12_HUMAN
ALTEVPPTRGQRRARS

SEQ ID NO: 28242 - protein, 16 aa, Homo sapiens
  ( 199 )...( 214 ): >RN12_HUMAN
LTEVPPTRGQRRARSR

SEQ ID NO: 28243 - protein, 16 aa, Homo sapiens
  ( 200 )...( 215 ): >RN12_HUMAN
TEVPPTRGQRRARSRS

SEQ ID NO: 28244 - protein, 16 aa, Homo sapiens
  ( 314 )...( 329 ): >RN12_HUMAN
QRPPTIVLDLQVRRVR

SEQ ID NO: 28245 - protein, 16 aa, Homo sapiens
  ( 315 )...( 330 ): >RN12_HUMAN
RPPTIVLDLQVRRVRP

SEQ ID NO: 28246 - protein, 16 aa, Homo sapiens
  ( 335 )...( 350 ): >RN12_HUMAN
QRDSIASRTRSRSQTP

SEQ ID NO: 28247 - protein, 16 aa, Homo sapiens
  ( 339 )...( 354 ): >RN12_HUMAN
IASRTRSRSQTPNNTV

SEQ ID NO: 28248 - protein, 16 aa, Homo sapiens
  ( 340 )...( 355 ): >RN12_HUMAN
ASRTRSRSQTPNNTVT

SEQ ID NO: 28249 - protein, 16 aa, Homo sapiens
  ( 341 )...( 356 ): >RN12_HUMAN
SRTRSRSQTPNNTVTY

SEQ ID NO: 28250 - protein, 16 aa, Homo sapiens
  ( 359 )...( 374 ): >RN12_HUMAN
ERGGFRRTFSRSERAG

SEQ ID NO: 28251 - protein, 16 aa, Homo sapiens
  ( 360 )...( 375 ): >RN12_HUMAN
RGGFRRTFSRSERAGV

SEQ ID NO: 28252 - protein, 16 aa, Homo sapiens
  ( 361 )...( 376 ): >RN12_HUMAN
GGFRRTFSRSERAGVR

SEQ ID NO: 28253 - protein, 16 aa, Homo sapiens
  ( 362 )...( 377 ): >RN12_HUMAN
GFRRTFSRSERAGVRT

SEQ ID NO: 28254 - protein, 16 aa, Homo sapiens
  ( 364 )...( 379 ): >RN12_HUMAN
RRTFSRSERAGVRTYV

SEQ ID NO: 28255 - protein, 16 aa, Homo sapiens
  ( 365 )...( 380 ): >RN12_HUMAN
RTFSRSERAGVRTYVS

SEQ ID NO: 28256 - protein, 16 aa, Homo sapiens
  ( 368 )...( 383 ): >RN12_HUMAN
SRSERAGVRTYVSTIR

SEQ ID NO: 28257 - protein, 16 aa, Homo sapiens
  ( 369 )...( 384 ): >RN12_HUMAN
RSERAGVRTYVSTIRI

SEQ ID NO: 28258 - protein, 16 aa, Homo sapiens
  ( 372 )...( 387 ): >RN12_HUMAN
RAGVRTYVSTIRIPIR

SEQ ID NO: 28259 - protein, 16 aa, Homo sapiens
  ( 373 )...( 388 ): >RN12_HUMAN
AGVRTYVSTIRIPIRR

SEQ ID NO: 28260 - protein, 16 aa, Homo sapiens
  ( 374 )...( 389 ): >RN12_HUMAN
GVRTYVSTIRIPIRRI

SEQ ID NO: 28261 - protein, 16 aa, Homo sapiens
  ( 375 )...( 390 ): >RN12_HUMAN
VRTYVSTIRIPIRRIL

SEQ ID NO: 28262 - protein, 16 aa, Homo sapiens
  ( 376 )...( 391 ): >RN12_HUMAN
RTYVSTIRIPIRRILN

SEQ ID NO: 28263 - protein, 16 aa, Homo sapiens
  ( 377 )...( 392 ): >RN12_HUMAN
TYVSTIRIPIRRILNT

SEQ ID NO: 28264 - protein, 16 aa, Homo sapiens
  ( 378 )...( 393 ): >RN12_HUMAN
YVSTIRIPIRRILNTG

SEQ ID NO: 28265 - protein, 16 aa, Homo sapiens
  ( 379 )...( 394 ): >RN12_HUMAN
VSTIRIPIRRILNTGL

SEQ ID NO: 28266 - protein, 16 aa, Homo sapiens
  ( 380 )...( 395 ): >RN12_HUMAN
STIRIPIRRILNTGLS

SEQ ID NO: 28267 - protein, 16 aa, Homo sapiens
  ( 504 )...( 519 ): >RN12_HUMAN
GSSGARREGRHRAPVT

SEQ ID NO: 28268 - protein, 16 aa, Homo sapiens
  ( 505 )...( 520 ): >RN12_HUMAN
SSGARREGRHRAPVTF

SEQ ID NO: 28269 - protein, 16 aa, Homo sapiens
  ( 49 )...( 64 ): >RN19_HUMAN
SSVSLPSVKKAPKKRR

SEQ ID NO: 28270 - protein, 16 aa, Homo sapiens
  ( 50 )...( 65 ): >RN19_HUMAN
SVSLPSVKKAPKKRRI

SEQ ID NO: 28271 - protein, 16 aa, Homo sapiens
  ( 51 )...( 66 ): >RN19_HUMAN
VSLPSVKKAPKKRRIS

SEQ ID NO: 28272 - protein, 16 aa, Homo sapiens
  ( 52 )...( 67 ): >RN19_HUMAN
SLPSVKKAPKKRRISI

SEQ ID NO: 28273 - protein, 16 aa, Homo sapiens
  ( 53 )...( 68 ): >RN19_HUMAN
LPSVKKAPKKRRISIG

SEQ ID NO: 28274 - protein, 16 aa, Homo sapiens
  ( 54 )...( 69 ): >RN19_HUMAN
PSVKKAPKKRRISIGS

SEQ ID NO: 28275 - protein, 16 aa, Homo sapiens
  ( 55 )...( 70 ): >RN19_HUMAN
SVKKAPKKRRISIGSL

SEQ ID NO: 28276 - protein, 16 aa, Homo sapiens
  ( 56 )...( 71 ): >RN19_HUMAN
VKKAPKKRRISIGSLF

SEQ ID NO: 28277 - protein, 16 aa, Homo sapiens
  ( 266 )...( 281 ): >RN19_HUMAN
AARQERAQSLRLRTIR

SEQ ID NO: 28278 - protein, 16 aa, Homo sapiens
  ( 269 )...( 284 ): >RN19_HUMAN
QERAQSLRLRTIRSSS

SEQ ID NO: 28279 - protein, 16 aa, Homo sapiens
  ( 270 )...( 285 ): >RN19_HUMAN
ERAQSLRLRTIRSSSI

SEQ ID NO: 28280 - protein, 16 aa, Homo sapiens
  ( 271 )...( 286 ): >RN19_HUMAN
RAQSLRLRTIRSSSIS

SEQ ID NO: 28281 - protein, 16 aa, Homo sapiens
  ( 272 )...( 287 ): >RN19_HUMAN
AQSLRLRTIRSSSISY

SEQ ID NO: 28282 - protein, 16 aa, Homo sapiens
  ( 273 )...( 288 ): >RN19_HUMAN
QSLRLRTIRSSSISYS

SEQ ID NO: 28283 - protein, 16 aa, Homo sapiens
  ( 274 )...( 289 ): >RN19_HUMAN
SLRLRTIRSSSISYSQ

SEQ ID NO: 28284 - protein, 16 aa, Homo sapiens
  ( 354 )...( 369 ): >RN19_HUMAN
PWSRKKKILWQLGTLV

SEQ ID NO: 28285 - protein, 16 aa, Homo sapiens
  ( 355 )...( 370 ): >RN19_HUMAN
WSRKKKILWQLGTLVG

SEQ ID NO: 28286 - protein, 16 aa, Homo sapiens
  ( 356 )...( 371 ): >RN19_HUMAN
SRKKKILWQLGTLVGA

SEQ ID NO: 28287 - protein, 16 aa, Homo sapiens
  ( 357 )...( 372 ): >RN19_HUMAN
RKKKILWQLGTLVGAP

SEQ ID NO: 28288 - protein, 16 aa, Homo sapiens
  ( 358 )...( 373 ): >RN19_HUMAN
KKKILWQLGTLVGAPV

SEQ ID NO: 28289 - protein, 16 aa, Homo sapiens
  ( 386 )...( 401 ): >RN19_HUMAN
MIIGIPVYVGRKIHNR

SEQ ID NO: 28290 - protein, 16 aa, Homo sapiens
  ( 387 )...( 402 ): >RN19_HUMAN
IIGIPVYVGRKIHNRY

SEQ ID NO: 28291 - protein, 16 aa, Homo sapiens
  ( 390 )...( 405 ): >RN19_HUMAN
IPVYVGRKIHNRYEGK

SEQ ID NO: 28292 - protein, 16 aa, Homo sapiens
  ( 394 )...( 409 ): >RN19_HUMAN
VGRKIHNRYEGKDVSK

SEQ ID NO: 28293 - protein, 16 aa, Homo sapiens
  ( 662 )...( 677 ): >RN19_HUMAN
KWSKEATAGKKSKSGK

SEQ ID NO: 28294 - protein, 16 aa, Homo sapiens
  ( 663 )...( 678 ): >RN19_HUMAN
WSKEATAGKKSKSGKL

SEQ ID NO: 28295 - protein, 16 aa, Homo sapiens
  ( 664 )...( 679 ): >RN19_HUMAN
SKEATAGKKSKSGKLR

SEQ ID NO: 28296 - protein, 16 aa, Homo sapiens
  ( 665 )...( 680 ): >RN19_HUMAN
KEATAGKKSKSGKLRK

SEQ ID NO: 28297 - protein, 16 aa, Homo sapiens
  ( 666 )...( 681 ): >RN19_HUMAN
EATAGKKSKSGKLRKK

SEQ ID NO: 28298 - protein, 16 aa, Homo sapiens
  ( 668 )...( 683 ): >RN19_HUMAN
TAGKKSKSGKLRKKGN

SEQ ID NO: 28299 - protein, 16 aa, Homo sapiens
  ( 669 )...( 684 ): >RN19_HUMAN
AGKKSKSGKLRKKGNM

SEQ ID NO: 28300 - protein, 16 aa, Homo sapiens
  ( 670 )...( 685 ): >RN19_HUMAN
GKKSKSGKLRKKGNMK

SEQ ID NO: 28301 - protein, 16 aa, Homo sapiens
  ( 671 )...( 686 ): >RN19_HUMAN
KKSKSGKLRKKGNMKI

SEQ ID NO: 28302 - protein, 16 aa, Homo sapiens
  ( 672 )...( 687 ): >RN19_HUMAN
KSKSGKLRKKGNMKIN

SEQ ID NO: 28303 - protein, 16 aa, Homo sapiens
  ( 673 )...( 688 ): >RN19_HUMAN
SKSGKLRKKGNMKINE

SEQ ID NO: 28304 - protein, 16 aa, Homo sapiens
  ( 674 )...( 689 ): >RN19_HUMAN
KSGKLRKKGNMKINET

SEQ ID NO: 28305 - protein, 16 aa, Homo sapiens
  ( 675 )...( 690 ): >RN19_HUMAN
SGKLRKKGNMKINETR

SEQ ID NO: 28306 - protein, 16 aa, Homo sapiens
  ( 676 )...( 691 ): >RN19_HUMAN
GKLRKKGNMKINETRE

SEQ ID NO: 28307 - protein, 16 aa, Homo sapiens
  ( 27 )...( 42 ): >RPCZ_HUMAN
TCPYVHNITRKVTNRK

SEQ ID NO: 28308 - protein, 16 aa, Homo sapiens
  ( 477 )...( 492 ): >RPF1_HUMAN
IREFAKAFKIRRLSLG

SEQ ID NO: 28309 - protein, 16 aa, Homo sapiens
  ( 478 )...( 493 ): >RPF1_HUMAN
REFAKAFKIRRLSLGL

SEQ ID NO: 28310 - protein, 16 aa, Homo sapiens
  ( 479 )...( 494 ): >RPF1_HUMAN
EFAKAFKIRRLSLGLT

SEQ ID NO: 28311 - protein, 16 aa, Homo sapiens
  ( 480 )...( 495 ): >RPF1_HUMAN
FAKAFKIRRLSLGLTQ

SEQ ID NO: 28312 - protein, 16 aa, Homo sapiens
  ( 481 )...( 496 ): >RPF1_HUMAN
AKAFKIRRLSLGLTQT

SEQ ID NO: 28313 - protein, 16 aa, Homo sapiens
  ( 482 )...( 497 ): >RPF1_HUMAN
KAFKIRRLSLGLTQTQ

SEQ ID NO: 28314 - protein, 16 aa, Homo sapiens
  ( 483 )...( 498 ): >RPF1_HUMAN
AFKIRRLSLGLTQTQV

SEQ ID NO: 28315 - protein, 16 aa, Homo sapiens
  ( 484 )...( 499 ): >RPF1_HUMAN
FKIRRLSLGLTQTQVG

SEQ ID NO: 28316 - protein, 16 aa, Homo sapiens
  ( 485 )...( 500 ): >RPF1_HUMAN
KIRRLSLGLTQTQVGQ

SEQ ID NO: 28317 - protein, 16 aa, Homo sapiens
  ( 559 )...( 574 ): >RPF1_HUMAN
ITPKSAQKIKPVLERW

SEQ ID NO: 28318 - protein, 16 aa, Homo sapiens
  ( 560 )...( 575 ): >RPF1_HUMAN
TPKSAQKIKPVLERWM

SEQ ID NO: 28319 - protein, 16 aa, Homo sapiens
  ( 561 )...( 576 ): >RPF1_HUMAN
PKSAQKIKPVLERWMA

SEQ ID NO: 28320 - protein, 16 aa, Homo sapiens
  ( 593 )...( 608 ): >RPF1_HUMAN
IGSEPSKKRKRRTSFT

SEQ ID NO: 28321 - protein, 16 aa, Homo sapiens
  ( 102 )...( 117 ): >RRE1_HUMAN
SALLSGTALLRPLRPK

SEQ ID NO: 28322 - protein, 16 aa, Homo sapiens
  ( 103 )...( 118 ): >RRE1_HUMAN
ALLSGTALLRPLRPKP

SEQ ID NO: 28323 - protein, 16 aa, Homo sapiens
  ( 209 )...( 224 ): >RRE1_HUMAN
SPTEQGPARTSKKRGR

SEQ ID NO: 28324 - protein, 16 aa, Homo sapiens
  ( 210 )...( 225 ): >RRE1_HUMAN
PTEQGPARTSKKRGRK

SEQ ID NO: 28325 - protein, 16 aa, Homo sapiens
  ( 301 )...( 316 ): >RRE1_HUMAN
LRAKRNSYTNCLQKIT

SEQ ID NO: 28326 - protein, 16 aa, Homo sapiens
  ( 432 )...( 447 ): >RRE1_HUMAN
GLRHQAHGLQAGGGRR

SEQ ID NO: 28327 - protein, 16 aa, Homo sapiens
  ( 433 )...( 448 ): >RRE1_HUMAN
LRHQAHGLQAGGGRRR

SEQ ID NO: 28328 - protein, 16 aa, Homo sapiens
  ( 434 )...( 449 ): >RRE1_HUMAN
RHQAHGLQAGGGRRRG

SEQ ID NO: 28329 - protein, 16 aa, Homo sapiens
  ( 435 )...( 450 ): >RRE1_HUMAN
HQAHGLQAGGGRRRGR

SEQ ID NO: 28330 - protein, 16 aa, Homo sapiens
  ( 436 )...( 451 ): >RRE1_HUMAN
QAHGLQAGGGRRRGRP

SEQ ID NO: 28331 - protein, 16 aa, Homo sapiens
  ( 446 )...( 461 ): >RRE1_HUMAN
RRRGRPGGAASQEQKL

SEQ ID NO: 28332 - protein, 16 aa, Homo sapiens
  ( 447 )...( 462 ): >RRE1_HUMAN
RRGRPGGAASQEQKLA

SEQ ID NO: 28333 - protein, 16 aa, Homo sapiens
  ( 466 )...( 481 ): >RRE1_HUMAN
CGKSFKFLGTLSRHRK

SEQ ID NO: 28334 - protein, 16 aa, Homo sapiens
  ( 467 )...( 482 ): >RRE1_HUMAN
GKSFKFLGTLSRHRKA

SEQ ID NO: 28335 - protein, 16 aa, Homo sapiens
  ( 469 )...( 484 ): >RRE1_HUMAN
SFKFLGTLSRHRKAHG

SEQ ID NO: 28336 - protein, 16 aa, Homo sapiens
  ( 471 )...( 486 ): >RRE1_HUMAN
KFLGTLSRHRKAHGRQ

SEQ ID NO: 28337 - protein, 16 aa, Homo sapiens
  ( 472 )...( 487 ): >RRE1_HUMAN
FLGTLSRHRKAHGRQE

SEQ ID NO: 28338 - protein, 16 aa, Homo sapiens
  ( 473 )...( 488 ): >RRE1_HUMAN
LGTLSRHRKAHGRQEP

SEQ ID NO: 28339 - protein, 16 aa, Homo sapiens
  ( 474 )...( 489 ): >RRE1_HUMAN
GTLSRHRKAHGRQEPK

SEQ ID NO: 28340 - protein, 16 aa, Homo sapiens
  ( 569 )...( 584 ): >RRE1_HUMAN
KSVASKADKRKKVCSV

SEQ ID NO: 28341 - protein, 16 aa, Homo sapiens
  ( 573 )...( 588 ): >RRE1_HUMAN
SKADKRKKVCSVCNKR

SEQ ID NO: 28342 - protein, 16 aa, Homo sapiens
  ( 680 )...( 695 ): >RRE1_HUMAN
MAVTRSRKEGLASATK

SEQ ID NO: 28343 - protein, 16 aa, Homo sapiens
  ( 178 )...( 193 ): >RUN2_HUMAN
QVARFNDLRFVGRSGR

SEQ ID NO: 28344 - protein, 16 aa, Homo sapiens
  ( 179 )...( 194 ): >RUN2_HUMAN
VARFNDLRFVGRSGRG

SEQ ID NO: 28345 - protein, 16 aa, Homo sapiens
  ( 180 )...( 195 ): >RUN2_HUMAN
ARFNDLRFVGRSGRGK

SEQ ID NO: 28346 - protein, 16 aa, Homo sapiens
  ( 181 )...( 196 ): >RUN2_HUMAN
RFNDLRFVGRSGRGKS

SEQ ID NO: 28347 - protein, 16 aa, Homo sapiens
  ( 184 )...( 199 ): >RUN2_HUMAN
DLRFVGRSGRGKSFTL

SEQ ID NO: 28348 - protein, 16 aa, Homo sapiens
  ( 185 )...( 200 ): >RUN2_HUMAN
LRFVGRSGRGKSFTLT

SEQ ID NO: 28349 - protein, 16 aa, Homo sapiens
  ( 186 )...( 201 ): >RUN2_HUMAN
RFVGRSGRGKSFTLTI

SEQ ID NO: 28350 - protein, 16 aa, Homo sapiens
  ( 187 )...( 202 ): >RUN2_HUMAN
FVGRSGRGKSFTLTIT

SEQ ID NO: 28351 - protein, 16 aa, Homo sapiens
  ( 189 )...( 204 ): >RUN2_HUMAN
GRSGRGKSFTLTITVF

SEQ ID NO: 28352 - protein, 16 aa, Homo sapiens
  ( 214 )...( 229 ): >RUN2_HUMAN
HRAIKVTVDGPREPRR

SEQ ID NO: 28353 - protein, 16 aa, Homo sapiens
  ( 215 )...( 230 ): >RUN2_HUMAN
RAIKVTVDGPREPRRH

SEQ ID NO: 28354 - protein, 16 aa, Homo sapiens
  ( 216 )...( 231 ): >RUN2_HUMAN
AIKVTVDGPREPRRHR

SEQ ID NO: 28355 - protein, 16 aa, Homo sapiens
  ( 634 )...( 649 ): >SAL2_HUMAN
VICLRVLSCPRALRLH

SEQ ID NO: 28356 - protein, 16 aa, Homo sapiens
  ( 637 )...( 652 ): >SAL2_HUMAN
LRVLSCPRALRLHYGQ

SEQ ID NO: 28357 - protein, 16 aa, Homo sapiens
  ( 638 )...( 653 ): >SAL2_HUMAN
RVLSCPRALRLHYGQH

SEQ ID NO: 28358 - protein, 16 aa, Homo sapiens
  ( 943 )...( 958 ): >SAL2_HUMAN
VFCRQGFLERATLKKH

SEQ ID NO: 28359 - protein, 16 aa, Homo sapiens
  ( 945 )...( 960 ): >SAL2_HUMAN
CRQGFLERATLKKHML

SEQ ID NO: 28360 - protein, 16 aa, Homo sapiens
  ( 946 )...( 961 ): >SAL2_HUMAN
RQGFLERATLKKHMLL

SEQ ID NO: 28361 - protein, 16 aa, Homo sapiens
  ( 710 )...( 725 ): >SAL3_HUMAN
KICGRAFTTKGNLKTH

SEQ ID NO: 28362 - protein, 16 aa, Homo sapiens
  ( 718 )...( 733 ): >SAL3_HUMAN
TKGNLKTHFGVHRAKP

SEQ ID NO: 28363 - protein, 16 aa, Homo sapiens
  ( 722 )...( 737 ): >SAL3_HUMAN
LKTHFGVHRAKPPLRV

SEQ ID NO: 28364 - protein, 16 aa, Homo sapiens
  ( 723 )...( 738 ): >SAL3_HUMAN
KTHFGVHRAKPPLRVQ

SEQ ID NO: 28365 - protein, 16 aa, Homo sapiens
  ( 744 )...( 759 ): >SAL3_HUMAN
CQKKFTNAVVLQQHIR

SEQ ID NO: 28366 - protein, 16 aa, Homo sapiens
  ( 745 )...( 760 ): >SAL3_HUMAN
QKKFTNAVVLQQHIRM

SEQ ID NO: 28367 - protein, 16 aa, Homo sapiens
  ( 1011 )...( 1026 ): >SAL3_HUMAN
RRGCSTMGNLKQHLLT

SEQ ID NO: 28368 - protein, 16 aa, Homo sapiens
  ( 1169 )...( 1184 ): >SAL3_HUMAN
PARRGRRLSVENPMAL

SEQ ID NO: 28369 - protein, 16 aa, Homo sapiens
  ( 1170 )...( 1185 ): >SAL3_HUMAN
ARRGRRLSVENPMALL

SEQ ID NO: 28370 - protein, 16 aa, Homo sapiens
  ( 1171 )...( 1186 ): >SAL3_HUMAN
RRGRRLSVENPMALLG

SEQ ID NO: 28371 - protein, 16 aa, Homo sapiens
  ( 172 )...( 187 ): >SAL4_HUMAN
AKGKVANTNVTLQALR

SEQ ID NO: 28372 - protein, 16 aa, Homo sapiens
  ( 173 )...( 188 ): >SAL4_HUMAN
KGKVANTNVTLQALRG

SEQ ID NO: 28373 - protein, 16 aa, Homo sapiens
  ( 175 )...( 190 ): >SAL4_HUMAN
KVANTNVTLQALRGTK

SEQ ID NO: 28374 - protein, 16 aa, Homo sapiens
  ( 181 )...( 196 ): >SAL4_HUMAN
VTLQALRGTKVAVNQR

SEQ ID NO: 28375 - protein, 16 aa, Homo sapiens
  ( 182 )...( 197 ): >SAL4_HUMAN
TLQALRGTKVAVNQRS

SEQ ID NO: 28376 - protein, 16 aa, Homo sapiens
  ( 183 )...( 198 ): >SAL4_HUMAN
LQALRGTKVAVNQRSA

SEQ ID NO: 28377 - protein, 16 aa, Homo sapiens
  ( 631 )...( 646 ): >SAL4_HUMAN
CQKKFTNAVMLQQHIR

SEQ ID NO: 28378 - protein, 16 aa, Homo sapiens
  ( 854 )...( 869 ): >SAL4_HUMAN
GMTPLLAAQPRRQAKQ

SEQ ID NO: 28379 - protein, 16 aa, Homo sapiens
  ( 855 )...( 870 ): >SAL4_HUMAN
MTPLLAAQPRRQAKQH

SEQ ID NO: 28380 - protein, 16 aa, Homo sapiens
  ( 856 )...( 871 ): >SAL4_HUMAN
TPLLAAQPRRQAKQHG

SEQ ID NO: 28381 - protein, 16 aa, Homo sapiens
  ( 858 )...( 873 ): >SAL4_HUMAN
LLAAQPRRQAKQHGCT

SEQ ID NO: 28382 - protein, 16 aa, Homo sapiens
  ( 859 )...( 874 ): >SAL4_HUMAN
LAAQPRRQAKQHGCTR

SEQ ID NO: 28383 - protein, 16 aa, Homo sapiens
  ( 862 )...( 877 ): >SAL4_HUMAN
QPRRQAKQHGCTRCGK

SEQ ID NO: 28384 - protein, 16 aa, Homo sapiens
  ( 920 )...( 935 ): >SAL4_HUMAN
HGANNNSARRGRKLAI

SEQ ID NO: 28385 - protein, 16 aa, Homo sapiens
  ( 921 )...( 936 ): >SAL4_HUMAN
GANNNSARRGRKLAIE

SEQ ID NO: 28386 - protein, 16 aa, Homo sapiens
  ( 924 )...( 939 ): >SAL4_HUMAN
NNSARRGRKLAIENTM

SEQ ID NO: 28387 - protein, 16 aa, Homo sapiens
  ( 925 )...( 940 ): >SAL4_HUMAN
NSARRGRKLAIENTMA

SEQ ID NO: 28388 - protein, 16 aa, Homo sapiens
  ( 926 )...( 941 ): >SAL4_HUMAN
SARRGRKLAIENTMAL

SEQ ID NO: 28389 - protein, 16 aa, Homo sapiens
  ( 927 )...( 942 ): >SAL4_HUMAN
ARRGRKLAIENTMALL

SEQ ID NO: 28390 - protein, 16 aa, Homo sapiens
  ( 928 )...( 943 ): >SAL4_HUMAN
RRGRKLAIENTMALLG

SEQ ID NO: 28391 - protein, 16 aa, Homo sapiens
  ( 38 )...( 53 ): >SIM1_HUMAN
DKASIIRLTTSYLKMR

SEQ ID NO: 28392 - protein, 16 aa, Homo sapiens
  ( 39 )...( 54 ): >SIM1_HUMAN
KASIIRLTTSYLKMRV

SEQ ID NO: 28393 - protein, 16 aa, Homo sapiens
  ( 40 )...( 55 ): >SIM1_HUMAN
ASIIRLTTSYLKMRVV

SEQ ID NO: 28394 - protein, 16 aa, Homo sapiens
  ( 41 )...( 56 ): >SIM1_HUMAN
SIIRLTTSYLKMRVVF

SEQ ID NO: 28395 - protein, 16 aa, Homo sapiens
  ( 160 )...( 175 ): >SIM1_HUMAN
FFLRMKCVLAKRNAGL

SEQ ID NO: 28396 - protein, 16 aa, Homo sapiens
  ( 161 )...( 176 ): >SIM1_HUMAN
FLRMKCVLAKRNAGLT

SEQ ID NO: 28397 - protein, 16 aa, Homo sapiens
  ( 178 )...( 193 ): >SIM1_HUMAN
GGYKVIHCSGYLKIRQ

SEQ ID NO: 28398 - protein, 16 aa, Homo sapiens
  ( 179 )...( 194 ): >SIM1_HUMAN
GYKVIHCSGYLKIRQY

SEQ ID NO: 28399 - protein, 16 aa, Homo sapiens
  ( 284 )...( 299 ): >SIM1_HUMAN
LLVKGQVTTKYYRFLA

SEQ ID NO: 28400 - protein, 16 aa, Homo sapiens
  ( 285 )...( 300 ): >SIM1_HUMAN
LVKGQVTTKYYRFLAK

SEQ ID NO: 28401 - protein, 16 aa, Homo sapiens
  ( 286 )...( 301 ): >SIM1_HUMAN
VKGQVTTKYYRFLAKH

SEQ ID NO: 28402 - protein, 16 aa, Homo sapiens
  ( 287 )...( 302 ): >SIM1_HUMAN
KGQVTTKYYRFLAKHG

SEQ ID NO: 28403 - protein, 16 aa, Homo sapiens
  ( 289 )...( 304 ): >SIM1_HUMAN
QVTTKYYRFLAKHGGW

SEQ ID NO: 28404 - protein, 16 aa, Homo sapiens
  ( 290 )...( 305 ): >SIM1_HUMAN
VTTKYYRFLAKHGGWV

SEQ ID NO: 28405 - protein, 16 aa, Homo sapiens
  ( 369 )...( 384 ): >SIM1_HUMAN
KGAKSRLSSSKSKSRT

SEQ ID NO: 28406 - protein, 16 aa, Homo sapiens
  ( 38 )...( 53 ): >SIM2_HUMAN
DKASIIRLTTSYLKMR

SEQ ID NO: 28407 - protein, 16 aa, Homo sapiens
  ( 39 )...( 54 ): >SIM2_HUMAN
KASIIRLTTSYLKMRA

SEQ ID NO: 28408 - protein, 16 aa, Homo sapiens
  ( 40 )...( 55 ): >SIM2_HUMAN
ASIIRLTTSYLKMRAV

SEQ ID NO: 28409 - protein, 16 aa, Homo sapiens
  ( 41 )...( 56 ): >SIM2_HUMAN
SIIRLTTSYLKMRAVF

SEQ ID NO: 28410 - protein, 16 aa, Homo sapiens
  ( 42 )...( 57 ): >SIM2_HUMAN
IIRLTTSYLKMRAVFP

SEQ ID NO: 28411 - protein, 16 aa, Homo sapiens
  ( 160 )...( 175 ): >SIM2_HUMAN
FFLRMKCVLAKRNAGL

SEQ ID NO: 28412 - protein, 16 aa, Homo sapiens
  ( 161 )...( 176 ): >SIM2_HUMAN
FLRMKCVLAKRNAGLT

SEQ ID NO: 28413 - protein, 16 aa, Homo sapiens
  ( 179 )...( 194 ): >SIM2_HUMAN
GYKVIHCSGYLKIRQY

SEQ ID NO: 28414 - protein, 16 aa, Homo sapiens
  ( 180 )...( 195 ): >SIM2_HUMAN
YKVIHCSGYLKIRQYM

SEQ ID NO: 28415 - protein, 16 aa, Homo sapiens
  ( 181 )...( 196 ): >SIM2_HUMAN
KVIHCSGYLKIRQYML

SEQ ID NO: 28416 - protein, 16 aa, Homo sapiens
  ( 284 )...( 299 ): >SIM2_HUMAN
LLVKGQVTTKYYRLLS

SEQ ID NO: 28417 - protein, 16 aa, Homo sapiens
  ( 285 )...( 300 ): >SIM2_HUMAN
LVKGQVTTKYYRLLSK

SEQ ID NO: 28418 - protein, 16 aa, Homo sapiens
  ( 286 )...( 301 ): >SIM2_HUMAN
VKGQVTTKYYRLLSKR

SEQ ID NO: 28419 - protein, 16 aa, Homo sapiens
  ( 287 )...( 302 ): >SIM2_HUMAN
KGQVTTKYYRLLSKRG

SEQ ID NO: 28420 - protein, 16 aa, Homo sapiens
  ( 288 )...( 303 ): >SIM2_HUMAN
GQVTTKYYRLLSKRGG

SEQ ID NO: 28421 - protein, 16 aa, Homo sapiens
  ( 289 )...( 304 ): >SIM2_HUMAN
QVTTKYYRLLSKRGGW

SEQ ID NO: 28422 - protein, 16 aa, Homo sapiens
  ( 290 )...( 305 ): >SIM2_HUMAN
VTTKYYRLLSKRGGWV

SEQ ID NO: 28423 - protein, 16 aa, Homo sapiens
  ( 296 )...( 311 ): >SIM2_HUMAN
RLLSKRGGWVWVQSYA

SEQ ID NO: 28424 - protein, 16 aa, Homo sapiens
  ( 356 )...( 371 ): >SIM2_HUMAN
WRTALSTSQETRKLVK

SEQ ID NO: 28425 - protein, 16 aa, Homo sapiens
  ( 361 )...( 376 ): >SIM2_HUMAN
STSQETRKLVKPKNTK

SEQ ID NO: 28426 - protein, 16 aa, Homo sapiens
  ( 362 )...( 377 ): >SIM2_HUMAN
TSQETRKLVKPKNTKM

SEQ ID NO: 28427 - protein, 16 aa, Homo sapiens
  ( 364 )...( 379 ): >SIM2_HUMAN
QETRKLVKPKNTKMKT

SEQ ID NO: 28428 - protein, 16 aa, Homo sapiens
  ( 365 )...( 380 ): >SIM2_HUMAN
ETRKLVKPKNTKMKTK

SEQ ID NO: 28429 - protein, 16 aa, Homo sapiens
  ( 366 )...( 381 ): >SIM2_HUMAN
TRKLVKPKNTKMKTKL

SEQ ID NO: 28430 - protein, 16 aa, Homo sapiens
  ( 368 )...( 383 ): >SIM2_HUMAN
KLVKPKNTKMKTKLRT

SEQ ID NO: 28431 - protein, 16 aa, Homo sapiens
  ( 369 )...( 384 ): >SIM2_HUMAN
LVKPKNTKMKTKLRTN

SEQ ID NO: 28432 - protein, 16 aa, Homo sapiens
  ( 560 )...( 575 ): >SIM2_HUMAN
AARQAARDGARLALAR

SEQ ID NO: 28433 - protein, 16 aa, Homo sapiens
  ( 561 )...( 576 ): >SIM2_HUMAN
ARQAARDGARLALARA

SEQ ID NO: 28434 - protein, 16 aa, Homo sapiens
  ( 562 )...( 577 ): >SIM2_HUMAN
RQAARDGARLALARAA

SEQ ID NO: 28435 - protein, 16 aa, Homo sapiens
  ( 595 )...( 610 ): >SIM2_HUMAN
LPFVLLNYHRVLARRG

SEQ ID NO: 28436 - protein, 16 aa, Homo sapiens
  ( 597 )...( 612 ): >SIM2_HUMAN
FVLLNYHRVLARRGPL

SEQ ID NO: 28437 - protein, 16 aa, Homo sapiens
  ( 598 )...( 613 ): >SIM2_HUMAN
VLLNYHRVLARRGPLG

SEQ ID NO: 28438 - protein, 16 aa, Homo sapiens
  ( 599 )...( 614 ): >SIM2_HUMAN
LLNYHRVLARRGPLGG

SEQ ID NO: 28439 - protein, 16 aa, Homo sapiens
  ( 600 )...( 615 ): >SIM2_HUMAN
LNYHRVLARRGPLGGA

SEQ ID NO: 28440 - protein, 16 aa, Homo sapiens
  ( 92 )...( 107 ): >SOX9_HUMAN
PVRVNGSSKNKPHVKR

SEQ ID NO: 28441 - protein, 16 aa, Homo sapiens
  ( 93 )...( 108 ): >SOX9_HUMAN
VRVNGSSKNKPHVKRP

SEQ ID NO: 28442 - protein, 16 aa, Homo sapiens
  ( 93 )...( 108 ): >SP11_HUMAN
YPNLVTIYRSFKRVGA

SEQ ID NO: 28443 - protein, 16 aa, Homo sapiens
  ( 94 )...( 109 ): >SP11_HUMAN
PNLVTIYRSFKRVGAS

SEQ ID NO: 28444 - protein, 16 aa, Homo sapiens
  ( 95 )...( 110 ): >SP11_HUMAN
NLVTIYRSFKRVGASY

SEQ ID NO: 28445 - protein, 16 aa, Homo sapiens
  ( 97 )...( 112 ): >SP11_HUMAN
VTIYRSFKRVGASYER

SEQ ID NO: 28446 - protein, 16 aa, Homo sapiens
  ( 266 )...( 281 ): >SP11_HUMAN
QEVSSTPSDKKGKKRK

SEQ ID NO: 28447 - protein, 16 aa, Homo sapiens
  ( 268 )...( 283 ): >SP11_HUMAN
VSSTPSDKKGKKRKRC

SEQ ID NO: 28448 - protein, 16 aa, Homo sapiens
  ( 269 )...( 284 ): >SP11_HUMAN
SSTPSDKKGKKRKRCI

SEQ ID NO: 28449 - protein, 16 aa, Homo sapiens
  ( 292 )...( 307 ): >SP11_HUMAN
HKKKSLPRGTASSRHG

SEQ ID NO: 28450 - protein, 16 aa, Homo sapiens
  ( 293 )...( 308 ): >SP11_HUMAN
KKKSLPRGTASSRHGI

SEQ ID NO: 28451 - protein, 16 aa, Homo sapiens
  ( 294 )...( 309 ): >SP11_HUMAN
KKSLPRGTASSRHGIQ

SEQ ID NO: 28452 - protein, 16 aa, Homo sapiens
  ( 295 )...( 310 ): >SP11_HUMAN
KSLPRGTASSRHGIQK

SEQ ID NO: 28453 - protein, 16 aa, Homo sapiens
  ( 296 )...( 311 ): >SP11_HUMAN
SLPRGTASSRHGIQKK

SEQ ID NO: 28454 - protein, 16 aa, Homo sapiens
  ( 297 )...( 312 ): >SP11_HUMAN
LPRGTASSRHGIQKKL

SEQ ID NO: 28455 - protein, 16 aa, Homo sapiens
  ( 298 )...( 313 ): >SP11_HUMAN
PRGTASSRHGIQKKLK

SEQ ID NO: 28456 - protein, 16 aa, Homo sapiens
  ( 299 )...( 314 ): >SP11_HUMAN
RGTASSRHGIQKKLKR

SEQ ID NO: 28457 - protein, 16 aa, Homo sapiens
  ( 300 )...( 315 ): >SP11_HUMAN
GTASSRHGIQKKLKRV

SEQ ID NO: 28458 - protein, 16 aa, Homo sapiens
  ( 301 )...( 316 ): >SP11_HUMAN
TASSRHGIQKKLKRVD

SEQ ID NO: 28459 - protein, 16 aa, Homo sapiens
  ( 302 )...( 317 ): >SP11_HUMAN
ASSRHGIQKKLKRVDQ

SEQ ID NO: 28460 - protein, 16 aa, Homo sapiens
  ( 303 )...( 318 ): >SP11_HUMAN
SSRHGIQKKLKRVDQV

SEQ ID NO: 28461 - protein, 16 aa, Homo sapiens
  ( 304 )...( 319 ): >SP11_HUMAN
SRHGIQKKLKRVDQVP

SEQ ID NO: 28462 - protein, 16 aa, Homo sapiens
  ( 305 )...( 320 ): >SP11_HUMAN
RHGIQKKLKRVDQVPQ

SEQ ID NO: 28463 - protein, 16 aa, Homo sapiens
  ( 306 )...( 321 ): >SP11_HUMAN
HGIQKKLKRVDQVPQK

SEQ ID NO: 28464 - protein, 16 aa, Homo sapiens
  ( 307 )...( 322 ): >SP11_HUMAN
GIQKKLKRVDQVPQKK

SEQ ID NO: 28465 - protein, 16 aa, Homo sapiens
  ( 330 )...( 345 ): >SP11_HUMAN
TVETRAQKARTECARK

SEQ ID NO: 28466 - protein, 16 aa, Homo sapiens
  ( 331 )...( 346 ): >SP11_HUMAN
VETRAQKARTECARKS

SEQ ID NO: 28467 - protein, 16 aa, Homo sapiens
  ( 359 )...( 374 ): >SP11_HUMAN
NEGKRSQKTPSTPRRV

SEQ ID NO: 28468 - protein, 16 aa, Homo sapiens
  ( 360 )...( 375 ): >SP11_HUMAN
EGKRSQKTPSTPRRVT

SEQ ID NO: 28469 - protein, 16 aa, Homo sapiens
  ( 361 )...( 376 ): >SP11_HUMAN
GKRSQKTPSTPRRVTQ

SEQ ID NO: 28470 - protein, 16 aa, Homo sapiens
  ( 362 )...( 377 ): >SP11_HUMAN
KRSQKTPSTPRRVTQG

SEQ ID NO: 28471 - protein, 16 aa, Homo sapiens
  ( 363 )...( 378 ): >SP11_HUMAN
RSQKTPSTPRRVTQGA

SEQ ID NO: 28472 - protein, 16 aa, Homo sapiens
  ( 364 )...( 379 ): >SP11_HUMAN
SQKTPSTPRRVTQGAA

SEQ ID NO: 28473 - protein, 16 aa, Homo sapiens
  ( 365 )...( 380 ): >SP11_HUMAN
QKTPSTPRRVTQGAAS

SEQ ID NO: 28474 - protein, 16 aa, Homo sapiens
  ( 403 )...( 418 ): >SP11_HUMAN
TWNSEVMMRVQKARTK

SEQ ID NO: 28475 - protein, 16 aa, Homo sapiens
  ( 405 )...( 420 ): >SP11_HUMAN
NSEVMMRVQKARTKCA

SEQ ID NO: 28476 - protein, 16 aa, Homo sapiens
  ( 406 )...( 421 ): >SP11_HUMAN
SEVMMRVQKARTKCAR

SEQ ID NO: 28477 - protein, 16 aa, Homo sapiens
  ( 407 )...( 422 ): >SP11_HUMAN
EVMMRVQKARTKCARK

SEQ ID NO: 28478 - protein, 16 aa, Homo sapiens
  ( 408 )...( 423 ): >SP11_HUMAN
VMMRVQKARTKCARKS

SEQ ID NO: 28479 - protein, 16 aa, Homo sapiens
  ( 412 )...( 427 ): >SP11_HUMAN
VQKARTKCARKSRSKE

SEQ ID NO: 28480 - protein, 16 aa, Homo sapiens
  ( 466 )...( 481 ): >SP11_HUMAN
VTCGEAKGILYKKKMK

SEQ ID NO: 28481 - protein, 16 aa, Homo sapiens
  ( 467 )...( 482 ): >SP11_HUMAN
TCGEAKGILYKKKMKH

SEQ ID NO: 28482 - protein, 16 aa, Homo sapiens
  ( 468 )...( 483 ): >SP11_HUMAN
CGEAKGILYKKKMKHG

SEQ ID NO: 28483 - protein, 16 aa, Homo sapiens
  ( 469 )...( 484 ): >SP11_HUMAN
GEAKGILYKKKMKHGS

SEQ ID NO: 28484 - protein, 16 aa, Homo sapiens
  ( 471 )...( 486 ): >SP11_HUMAN
AKGILYKKKMKHGSSV

SEQ ID NO: 28485 - protein, 16 aa, Homo sapiens
  ( 472 )...( 487 ): >SP11_HUMAN
KGILYKKKMKHGSSVK

SEQ ID NO: 28486 - protein, 16 aa, Homo sapiens
  ( 473 )...( 488 ): >SP11_HUMAN
GILYKKKMKHGSSVKC

SEQ ID NO: 28487 - protein, 16 aa, Homo sapiens
  ( 474 )...( 489 ): >SP11_HUMAN
ILYKKKMKHGSSVKCI

SEQ ID NO: 28488 - protein, 16 aa, Homo sapiens
  ( 475 )...( 490 ): >SP11_HUMAN
LYKKKMKHGSSVKCIR

SEQ ID NO: 28489 - protein, 16 aa, Homo sapiens
  ( 477 )...( 492 ): >SP11_HUMAN
KKKMKHGSSVKCIRNE

SEQ ID NO: 28490 - protein, 16 aa, Homo sapiens
  ( 126 )...( 141 ): >SPM1_HUMAN
LQQLAKELRQKRLSLG

SEQ ID NO: 28491 - protein, 16 aa, Homo sapiens
  ( 127 )...( 142 ): >SPM1_HUMAN
QQLAKELRQKRLSLGY

SEQ ID NO: 28492 - protein, 16 aa, Homo sapiens
  ( 128 )...( 143 ): >SPM1_HUMAN
QLAKELRQKRLSLGYS

SEQ ID NO: 28493 - protein, 16 aa, Homo sapiens
  ( 129 )...( 144 ): >SPM1_HUMAN
LAKELRQKRLSLGYSQ

SEQ ID NO: 28494 - protein, 16 aa, Homo sapiens
  ( 130 )...( 145 ): >SPM1_HUMAN
AKELRQKRLSLGYSQA

SEQ ID NO: 28495 - protein, 16 aa, Homo sapiens
  ( 170 )...( 185 ): >SPM1_HUMAN
QQLSVANMWKLRPLLK

SEQ ID NO: 28496 - protein, 16 aa, Homo sapiens
  ( 200 )...( 215 ): >SPM1_HUMAN
CKMEMILQQSGKWRRA

SEQ ID NO: 28497 - protein, 16 aa, Homo sapiens
  ( 201 )...( 216 ): >SPM1_HUMAN
KMEMILQQSGKWRRAS

SEQ ID NO: 28498 - protein, 16 aa, Homo sapiens
  ( 350 )...( 365 ): >SRE1_HUMAN
VVGTEAKLNKSAVLRK

SEQ ID NO: 28499 - protein, 16 aa, Homo sapiens
  ( 351 )...( 366 ): >SRE1_HUMAN
VGTEAKLNKSAVLRKA

SEQ ID NO: 28500 - protein, 16 aa, Homo sapiens
  ( 352 )...( 367 ): >SRE1_HUMAN
GTEAKLNKSAVLRKAI

SEQ ID NO: 28501 - protein, 16 aa, Homo sapiens
  ( 355 )...( 370 ): >SRE1_HUMAN
AKLNKSAVLRKAIDYI

SEQ ID NO: 28502 - protein, 16 aa, Homo sapiens
  ( 356 )...( 371 ): >SRE1_HUMAN
KLNKSAVLRKAIDYIR

SEQ ID NO: 28503 - protein, 16 aa, Homo sapiens
  ( 357 )...( 372 ): >SRE1_HUMAN
LNKSAVLRKAIDYIRF

SEQ ID NO: 28504 - protein, 16 aa, Homo sapiens
  ( 358 )...( 373 ): >SRE1_HUMAN
NKSAVLRKAIDYIRFL

SEQ ID NO: 28505 - protein, 16 aa, Homo sapiens
  ( 359 )...( 374 ): >SRE1_HUMAN
KSAVLRKAIDYIRFLQ

SEQ ID NO: 28506 - protein, 16 aa, Homo sapiens
  ( 468 )...( 483 ): >SRE1_HUMAN
KAKPEQRPSLHSRGML

SEQ ID NO: 28507 - protein, 16 aa, Homo sapiens
  ( 474 )...( 489 ): >SRE1_HUMAN
RPSLHSRGMLDRSRLA

SEQ ID NO: 28508 - protein, 16 aa, Homo sapiens
  ( 632 )...( 647 ): >SRE1_HUMAN
IRHLLQRLWVGRWLAG

SEQ ID NO: 28509 - protein, 16 aa, Homo sapiens
  ( 634 )...( 649 ): >SRE1_HUMAN
HLLQRLWVGRWLAGRA

SEQ ID NO: 28510 - protein, 16 aa, Homo sapiens
  ( 635 )...( 650 ): >SRE1_HUMAN
LLQRLWVGRWLAGRAG

SEQ ID NO: 28511 - protein, 16 aa, Homo sapiens
  ( 636 )...( 651 ): >SRE1_HUMAN
LQRLWVGRWLAGRAGG

SEQ ID NO: 28512 - protein, 16 aa, Homo sapiens
  ( 637 )...( 652 ): >SRE1_HUMAN
QRLWVGRWLAGRAGGL

SEQ ID NO: 28513 - protein, 16 aa, Homo sapiens
  ( 638 )...( 653 ): >SRE1_HUMAN
RLWVGRWLAGRAGGLQ

SEQ ID NO: 28514 - protein, 16 aa, Homo sapiens
  ( 718 )...( 733 ): >SRE1_HUMAN
IYVAAALRVKTSLPRA

SEQ ID NO: 28515 - protein, 16 aa, Homo sapiens
  ( 719 )...( 734 ): >SRE1_HUMAN
YVAAALRVKTSLPRAL

SEQ ID NO: 28516 - protein, 16 aa, Homo sapiens
  ( 720 )...( 735 ): >SRE1_HUMAN
VAAALRVKTSLPRALH

SEQ ID NO: 28517 - protein, 16 aa, Homo sapiens
  ( 721 )...( 736 ): >SRE1_HUMAN
AAALRVKTSLPRALHF

SEQ ID NO: 28518 - protein, 16 aa, Homo sapiens
  ( 722 )...( 737 ): >SRE1_HUMAN
AALRVKTSLPRALHFL

SEQ ID NO: 28519 - protein, 16 aa, Homo sapiens
  ( 723 )...( 738 ): >SRE1_HUMAN
ALRVKTSLPRALHFLT

SEQ ID NO: 28520 - protein, 16 aa, Homo sapiens
  ( 724 )...( 739 ): >SRE1_HUMAN
LRVKTSLPRALHFLTR

SEQ ID NO: 28521 - protein, 16 aa, Homo sapiens
  ( 726 )...( 741 ): >SRE1_HUMAN
VKTSLPRALHFLTRFF

SEQ ID NO: 28522 - protein, 16 aa, Homo sapiens
  ( 1029 )...( 1044 ): >SRE1_HUMAN
RPAMRRVFLHEATARL

SEQ ID NO: 28523 - protein, 16 aa, Homo sapiens
  ( 1053 )...( 1068 ): >SRE1_HUMAN
THQLLDRSLRRRAGPG

SEQ ID NO: 28524 - protein, 16 aa, Homo sapiens
  ( 1054 )...( 1069 ): >SRE1_HUMAN
HQLLDRSLRRRAGPGG

SEQ ID NO: 28525 - protein, 16 aa, Homo sapiens
  ( 1055 )...( 1070 ): >SRE1_HUMAN
QLLDRSLRRRAGPGGK

SEQ ID NO: 28526 - protein, 16 aa, Homo sapiens
  ( 1056 )...( 1071 ): >SRE1_HUMAN
LLDRSLRRRAGPGGKG

SEQ ID NO: 28527 - protein, 16 aa, Homo sapiens
  ( 363 )...( 378 ): >SRE2_HUMAN
KMHKSGVLRKAIDYIK

SEQ ID NO: 28528 - protein, 16 aa, Homo sapiens
  ( 366 )...( 381 ): >SRE2_HUMAN
KSGVLRKAIDYIKYLQ

SEQ ID NO: 28529 - protein, 16 aa, Homo sapiens
  ( 390 )...( 405 ): >SRE2_HUMAN
ENMVLKLANQKNKLLK

SEQ ID NO: 28530 - protein, 16 aa, Homo sapiens
  ( 391 )...( 406 ): >SRE2_HUMAN
NMVLKLANQKNKLLKG

SEQ ID NO: 28531 - protein, 16 aa, Homo sapiens
  ( 392 )...( 407 ): >SRE2_HUMAN
MVLKLANQKNKLLKGI

SEQ ID NO: 28532 - protein, 16 aa, Homo sapiens
  ( 393 )...( 408 ): >SRE2_HUMAN
VLKLANQKNKLLKGID

SEQ ID NO: 28533 - protein, 16 aa, Homo sapiens
  ( 394 )...( 409 ): >SRE2_HUMAN
LKLANQKNKLLKGIDL

SEQ ID NO: 28534 - protein, 16 aa, Homo sapiens
  ( 395 )...( 410 ): >SRE2_HUMAN
KLANQKNKLLKGIDLG

SEQ ID NO: 28535 - protein, 16 aa, Homo sapiens
  ( 636 )...( 651 ): >SRE2_HUMAN
WLLKKVFQCRRATPAT

SEQ ID NO: 28536 - protein, 16 aa, Homo sapiens
  ( 637 )...( 652 ): >SRE2_HUMAN
LLKKVFQCRRATPATE

SEQ ID NO: 28537 - protein, 16 aa, Homo sapiens
  ( 638 )...( 653 ): >SRE2_HUMAN
LKKVFQCRRATPATEA

SEQ ID NO: 28538 - protein, 16 aa, Homo sapiens
  ( 808 )...( 823 ): >SRE2_HUMAN
LERAIESLVKPQAKKK

SEQ ID NO: 28539 - protein, 16 aa, Homo sapiens
  ( 809 )...( 824 ): >SRE2_HUMAN
ERAIESLVKPQAKKKA

SEQ ID NO: 28540 - protein, 16 aa, Homo sapiens
  ( 810 )...( 825 ): >SRE2_HUMAN
RAIESLVKPQAKKKAG

SEQ ID NO: 28541 - protein, 16 aa, Homo sapiens
  ( 893 )...( 908 ): >SRE2_HUMAN
AAVRSHFTKVERIPKA

SEQ ID NO: 28542 - protein, 16 aa, Homo sapiens
  ( 894 )...( 909 ): >SRE2_HUMAN
AVRSHFTKVERIPKAL

SEQ ID NO: 28543 - protein, 16 aa, Homo sapiens
  ( 452 )...( 467 ): >SREC_HUMAN
LKDRPARDGATVSRMK

SEQ ID NO: 28544 - protein, 16 aa, Homo sapiens
  ( 453 )...( 468 ): >SREC_HUMAN
KDRPARDGATVSRMKL

SEQ ID NO: 28545 - protein, 16 aa, Homo sapiens
  ( 455 )...( 470 ): >SREC_HUMAN
RPARDGATVSRMKLQV

SEQ ID NO: 28546 - protein, 16 aa, Homo sapiens
  ( 572 )...( 587 ): >SREC_HUMAN
TPFAIPRTSSLARAKR

SEQ ID NO: 28547 - protein, 16 aa, Homo sapiens
  ( 575 )...( 590 ): >SREC_HUMAN
AIPRTSSLARAKRPSV

SEQ ID NO: 28548 - protein, 16 aa, Homo sapiens
  ( 576 )...( 591 ): >SREC_HUMAN
IPRTSSLARAKRPSVS

SEQ ID NO: 28549 - protein, 16 aa, Homo sapiens
  ( 582 )...( 597 ): >SREC_HUMAN
LARAKRPSVSFAEGTK

SEQ ID NO: 28550 - protein, 16 aa, Homo sapiens
  ( 604 )...( 619 ): >SREC_HUMAN
RSSGELSSPLRKPKRL

SEQ ID NO: 28551 - protein, 16 aa, Homo sapiens
  ( 606 )...( 621 ): >SREC_HUMAN
SGELSSPLRKPKRLSR

SEQ ID NO: 28552 - protein, 16 aa, Homo sapiens
  ( 607 )...( 622 ): >SREC_HUMAN
GELSSPLRKPKRLSRG

SEQ ID NO: 28553 - protein, 16 aa, Homo sapiens
  ( 608 )...( 623 ): >SREC_HUMAN
ELSSPLRKPKRLSRGA

SEQ ID NO: 28554 - protein, 16 aa, Homo sapiens
  ( 609 )...( 624 ): >SREC_HUMAN
LSSPLRKPKRLSRGAQ

SEQ ID NO: 28555 - protein, 16 aa, Homo sapiens
  ( 610 )...( 625 ): >SREC_HUMAN
SSPLRKPKRLSRGAQS

SEQ ID NO: 28556 - protein, 16 aa, Homo sapiens
  ( 611 )...( 626 ): >SREC_HUMAN
SPLRKPKRLSRGAQSG

SEQ ID NO: 28557 - protein, 16 aa, Homo sapiens
  ( 612 )...( 627 ): >SREC_HUMAN
PLRKPKRLSRGAQSGP

SEQ ID NO: 28558 - protein, 16 aa, Homo sapiens
  ( 613 )...( 628 ): >SREC_HUMAN
LRKPKRLSRGAQSGPE

SEQ ID NO: 28559 - protein, 16 aa, Homo sapiens
  ( 614 )...( 629 ): >SREC_HUMAN
RKPKRLSRGAQSGPEG

SEQ ID NO: 28560 - protein, 16 aa, Homo sapiens
  ( 615 )...( 630 ): >SREC_HUMAN
KPKRLSRGAQSGPEGR

SEQ ID NO: 28561 - protein, 16 aa, Homo sapiens
  ( 712 )...( 727 ): >SREC_HUMAN
FGSFQKGQAEAKVKRA

SEQ ID NO: 28562 - protein, 16 aa, Homo sapiens
  ( 713 )...( 728 ): >SREC_HUMAN
GSFQKGQAEAKVKRAI

SEQ ID NO: 28563 - protein, 16 aa, Homo sapiens
  ( 714 )...( 729 ): >SREC_HUMAN
SFQKGQAEAKVKRAIP

SEQ ID NO: 28564 - protein, 16 aa, Homo sapiens
  ( 715 )...( 730 ): >SREC_HUMAN
FQKGQAEAKVKRAIPK

SEQ ID NO: 28565 - protein, 16 aa, Homo sapiens
  ( 716 )...( 731 ): >SREC_HUMAN
QKGQAEAKVKRAIPKP

SEQ ID NO: 28566 - protein, 16 aa, Homo sapiens
  ( 717 )...( 732 ): >SREC_HUMAN
KGQAEAKVKRAIPKPP

SEQ ID NO: 28567 - protein, 16 aa, Homo sapiens
  ( 718 )...( 733 ): >SREC_HUMAN
GQAEAKVKRAIPKPPR

SEQ ID NO: 28568 - protein, 16 aa, Homo sapiens
  ( 719 )...( 734 ): >SREC_HUMAN
QAEAKVKRAIPKPPRQ

SEQ ID NO: 28569 - protein, 16 aa, Homo sapiens
  ( 720 )...( 735 ): >SREC_HUMAN
AEAKVKRAIPKPPRQA

SEQ ID NO: 28570 - protein, 16 aa, Homo sapiens
  ( 721 )...( 736 ): >SREC_HUMAN
EAKVKRAIPKPPRQAL

SEQ ID NO: 28571 - protein, 16 aa, Homo sapiens
  ( 722 )...( 737 ): >SREC_HUMAN
AKVKRAIPKPPRQALN

SEQ ID NO: 28572 - protein, 16 aa, Homo sapiens
  ( 727 )...( 742 ): >SREC_HUMAN
AIPKPPRQALNRKKGS

SEQ ID NO: 28573 - protein, 16 aa, Homo sapiens
  ( 730 )...( 745 ): >SREC_HUMAN
KPPRQALNRKKGSPGL

SEQ ID NO: 28574 - protein, 16 aa, Homo sapiens
  ( 131 )...( 146 ): >SRF_HUMAN
VSGAKPGKKTRGRVKI

SEQ ID NO: 28575 - protein, 16 aa, Homo sapiens
  ( 132 )...( 147 ): >SRF_HUMAN
SGAKPGKKTRGRVKIK

SEQ ID NO: 28576 - protein, 16 aa, Homo sapiens
  ( 133 )...( 148 ): >SRF_HUMAN
GAKPGKKTRGRVKIKM

SEQ ID NO: 28577 - protein, 16 aa, Homo sapiens
  ( 134 )...( 149 ): >SRF_HUMAN
AKPGKKTRGRVKIKME

SEQ ID NO: 28578 - protein, 16 aa, Homo sapiens
  ( 135 )...( 150 ): >SRF_HUMAN
KPGKKTRGRVKIKMEF

SEQ ID NO: 28579 - protein, 16 aa, Homo sapiens
  ( 136 )...( 151 ): >SRF_HUMAN
PGKKTRGRVKIKMEFI

SEQ ID NO: 28580 - protein, 16 aa, Homo sapiens
  ( 137 )...( 152 ): >SRF_HUMAN
GKKTRGRVKIKMEFID

SEQ ID NO: 28581 - protein, 16 aa, Homo sapiens
  ( 140 )...( 155 ): >SRF_HUMAN
TRGRVKIKMEFIDNKL

SEQ ID NO: 28582 - protein, 16 aa, Homo sapiens
  ( 154 )...( 169 ): >SRF_HUMAN
KLRRYTTFSKRKTGIM

SEQ ID NO: 28583 - protein, 16 aa, Homo sapiens
  ( 155 )...( 170 ): >SRF_HUMAN
LRRYTTFSKRKTGIMK

SEQ ID NO: 28584 - protein, 16 aa, Homo sapiens
  ( 157 )...( 172 ): >SRF_HUMAN
RYTTFSKRKTGIMKKA

SEQ ID NO: 28585 - protein, 16 aa, Homo sapiens
  ( 158 )...( 173 ): >SRF_HUMAN
YTTFSKRKTGIMKKAY

SEQ ID NO: 28586 - protein, 16 aa, Homo sapiens
  ( 159 )...( 174 ): >SRF_HUMAN
TTFSKRKTGIMKKAYE

SEQ ID NO: 28587 - protein, 16 aa, Homo sapiens
  ( 160 )...( 175 ): >SRF_HUMAN
TFSKRKTGIMKKAYEL

SEQ ID NO: 28588 - protein, 16 aa, Homo sapiens
  ( 161 )...( 176 ): >SRF_HUMAN
FSKRKTGIMKKAYELS

SEQ ID NO: 28589 - protein, 16 aa, Homo sapiens
  ( 162 )...( 177 ): >SRF_HUMAN
SKRKTGIMKKAYELST

SEQ ID NO: 28590 - protein, 16 aa, Homo sapiens
  ( 163 )...( 178 ): >SRF_HUMAN
KRKTGIMKKAYELSTL

SEQ ID NO: 28591 - protein, 16 aa, Homo sapiens
  ( 232 )...( 247 ): >ST5A_HUMAN
KHQKTLQLLRKQQTII

SEQ ID NO: 28592 - protein, 16 aa, Homo sapiens
  ( 252 )...( 267 ): >ST5A_HUMAN
LIQWKRRQQLAGNGGP

SEQ ID NO: 28593 - protein, 16 aa, Homo sapiens
  ( 253 )...( 268 ): >ST5A_HUMAN
IQWKRRQQLAGNGGPP

SEQ ID NO: 28594 - protein, 16 aa, Homo sapiens
  ( 338 )...( 353 ): >ST5A_HUMAN
PPQVLKTQTKFAATVR

SEQ ID NO: 28595 - protein, 16 aa, Homo sapiens
  ( 339 )...( 354 ): >ST5A_HUMAN
PQVLKTQTKFAATVRL

SEQ ID NO: 28596 - protein, 16 aa, Homo sapiens
  ( 340 )...( 355 ): >ST5A_HUMAN
QVLKTQTKFAATVRLL

SEQ ID NO: 28597 - protein, 16 aa, Homo sapiens
  ( 341 )...( 356 ): >ST5A_HUMAN
VLKTQTKFAATVRLLV

SEQ ID NO: 28598 - protein, 16 aa, Homo sapiens
  ( 410 )...( 425 ): >ST5A_HUMAN
GTLSAHFRNMSLKRIK

SEQ ID NO: 28599 - protein, 16 aa, Homo sapiens
  ( 419 )...( 434 ): >ST5A_HUMAN
MSLKRIKRADRRGAES

SEQ ID NO: 28600 - protein, 16 aa, Homo sapiens
  ( 420 )...( 435 ): >ST5A_HUMAN
SLKRIKRADRRGAESV

SEQ ID NO: 28601 - protein, 16 aa, Homo sapiens
  ( 421 )...( 436 ): >ST5A_HUMAN
LKRIKRADRRGAESVT

SEQ ID NO: 28602 - protein, 16 aa, Homo sapiens
  ( 422 )...( 437 ): >ST5A_HUMAN
KRIKRADRRGAESVTE

SEQ ID NO: 28603 - protein, 16 aa, Homo sapiens
  ( 512 )...( 527 ): >ST5A_HUMAN
NMKFKAEVQSNRGLTK

SEQ ID NO: 28604 - protein, 16 aa, Homo sapiens
  ( 232 )...( 247 ): >ST5B_HUMAN
KHQKTLQLLRKQQTII

SEQ ID NO: 28605 - protein, 16 aa, Homo sapiens
  ( 252 )...( 267 ): >ST5B_HUMAN
LIQWKRRQQLAGNGGP

SEQ ID NO: 28606 - protein, 16 aa, Homo sapiens
  ( 253 )...( 268 ): >ST5B_HUMAN
IQWKRRQQLAGNGGPP

SEQ ID NO: 28607 - protein, 16 aa, Homo sapiens
  ( 338 )...( 353 ): >ST5B_HUMAN
PPQVLKTQTKFAATVR

SEQ ID NO: 28608 - protein, 16 aa, Homo sapiens
  ( 339 )...( 354 ): >ST5B_HUMAN
PQVLKTQTKFAATVRL

SEQ ID NO: 28609 - protein, 16 aa, Homo sapiens
  ( 340 )...( 355 ): >ST5B_HUMAN
QVLKTQTKFAATVRLL

SEQ ID NO: 28610 - protein, 16 aa, Homo sapiens
  ( 341 )...( 356 ): >ST5B_HUMAN
VLKTQTKFAATVRLLV

SEQ ID NO: 28611 - protein, 16 aa, Homo sapiens
  ( 410 )...( 425 ): >ST5B_HUMAN
GTLSAHFRNMSLKRIK

SEQ ID NO: 28612 - protein, 16 aa, Homo sapiens
  ( 420 )...( 435 ): >ST5B_HUMAN
SLKRIKRSDRRGAESV

SEQ ID NO: 28613 - protein, 16 aa, Homo sapiens
  ( 421 )...( 436 ): >ST5B_HUMAN
LKRIKRSDRRGAESVT

SEQ ID NO: 28614 - protein, 16 aa, Homo sapiens
  ( 422 )...( 437 ): >ST5B_HUMAN
KRIKRSDRRGAESVTE

SEQ ID NO: 28615 - protein, 16 aa, Homo sapiens
  ( 512 )...( 527 ): >ST5B_HUMAN
NMKFKAEVQSNRGLTK

SEQ ID NO: 28616 - protein, 16 aa, Homo sapiens
  ( 329 )...( 344 ): >STA1_HUMAN
PQRPLVLKTGVQFTVK

SEQ ID NO: 28617 - protein, 16 aa, Homo sapiens
  ( 330 )...( 345 ): >STA1_HUMAN
QRPLVLKTGVQFTVKL

SEQ ID NO: 28618 - protein, 16 aa, Homo sapiens
  ( 331 )...( 346 ): >STA1_HUMAN
RPLVLKTGVQFTVKLR

SEQ ID NO: 28619 - protein, 16 aa, Homo sapiens
  ( 332 )...( 347 ): >STA1_HUMAN
PLVLKTGVQFTVKLRL

SEQ ID NO: 28620 - protein, 16 aa, Homo sapiens
  ( 335 )...( 350 ): >STA1_HUMAN
LKTGVQFTVKLRLLVK

SEQ ID NO: 28621 - protein, 16 aa, Homo sapiens
  ( 336 )...( 351 ): >STA1_HUMAN
KTGVQFTVKLRLLVKL

SEQ ID NO: 28622 - protein, 16 aa, Homo sapiens
  ( 337 )...( 352 ): >STA1_HUMAN
TGVQFTVKLRLLVKLQ

SEQ ID NO: 28623 - protein, 16 aa, Homo sapiens
  ( 346 )...( 361 ): >STA1_HUMAN
RLLVKLQELNYNLKVK

SEQ ID NO: 28624 - protein, 16 aa, Homo sapiens
  ( 369 )...( 384 ): >STA1_HUMAN
NERNTVKGFRKFNILG

SEQ ID NO: 28625 - protein, 16 aa, Homo sapiens
  ( 370 )...( 385 ): >STA1_HUMAN
ERNTVKGFRKFNILGT

SEQ ID NO: 28626 - protein, 16 aa, Homo sapiens
  ( 371 )...( 386 ): >STA1_HUMAN
RNTVKGFRKFNILGTH

SEQ ID NO: 28627 - protein, 16 aa, Homo sapiens
  ( 373 )...( 388 ): >STA1_HUMAN
TVKGFRKFNILGTHTK

SEQ ID NO: 28628 - protein, 16 aa, Homo sapiens
  ( 374 )...( 389 ): >STA1_HUMAN
VKGFRKFNILGTHTKV

SEQ ID NO: 28629 - protein, 16 aa, Homo sapiens
  ( 375 )...( 390 ): >STA1_HUMAN
KGFRKFNILGTHTKVM

SEQ ID NO: 28630 - protein, 16 aa, Homo sapiens
  ( 405 )...( 420 ): >STA1_HUMAN
RHLQLKEQKNAGTRTN

SEQ ID NO: 28631 - protein, 16 aa, Homo sapiens
  ( 152 )...( 167 ): >STA2_HUMAN
LRAMMEKLVKSISQLK

SEQ ID NO: 28632 - protein, 16 aa, Homo sapiens
  ( 170 )...( 185 ): >STA2_HUMAN
QDVFCFRYKIQAKGKT

SEQ ID NO: 28633 - protein, 16 aa, Homo sapiens
  ( 208 )...( 223 ): >STA2_HUMAN
KRRKEVLDASKALLGR

SEQ ID NO: 28634 - protein, 16 aa, Homo sapiens
  ( 209 )...( 224 ): >STA2_HUMAN
RRKEVLDASKALLGRL

SEQ ID NO: 28635 - protein, 16 aa, Homo sapiens
  ( 262 )...( 277 ): >STA2_HUMAN
FTAGAKLLFHLRQLLK

SEQ ID NO: 28636 - protein, 16 aa, Homo sapiens
  ( 265 )...( 280 ): >STA2_HUMAN
GAKLLFHLRQLLKELK

SEQ ID NO: 28637 - protein, 16 aa, Homo sapiens
  ( 266 )...( 281 ): >STA2_HUMAN
AKLLFHLRQLLKELKG

SEQ ID NO: 28638 - protein, 16 aa, Homo sapiens
  ( 267 )...( 282 ): >STA2_HUMAN
KLLFHLRQLLKELKGL

SEQ ID NO: 28639 - protein, 16 aa, Homo sapiens
  ( 328 )...( 343 ): >STA2_HUMAN
PHRPLILKTGSKFTVR

SEQ ID NO: 28640 - protein, 16 aa, Homo sapiens
  ( 329 )...( 344 ): >STA2_HUMAN
HRPLILKTGSKFTVRT

SEQ ID NO: 28641 - protein, 16 aa, Homo sapiens
  ( 330 )...( 345 ): >STA2_HUMAN
RPLILKTGSKFTVRTR

SEQ ID NO: 28642 - protein, 16 aa, Homo sapiens
  ( 331 )...( 346 ): >STA2_HUMAN
PLILKTGSKFTVRTRL

SEQ ID NO: 28643 - protein, 16 aa, Homo sapiens
  ( 332 )...( 347 ): >STA2_HUMAN
LILKTGSKFTVRTRLL

SEQ ID NO: 28644 - protein, 16 aa, Homo sapiens
  ( 333 )...( 348 ): >STA2_HUMAN
ILKTGSKFTVRTRLLV

SEQ ID NO: 28645 - protein, 16 aa, Homo sapiens
  ( 334 )...( 349 ): >STA2_HUMAN
LKTGSKFTVRTRLLVR

SEQ ID NO: 28646 - protein, 16 aa, Homo sapiens
  ( 335 )...( 350 ): >STA2_HUMAN
KTGSKFTVRTRLLVRL

SEQ ID NO: 28647 - protein, 16 aa, Homo sapiens
  ( 336 )...( 351 ): >STA2_HUMAN
TGSKFTVRTRLLVRLQ

SEQ ID NO: 28648 - protein, 16 aa, Homo sapiens
  ( 337 )...( 352 ): >STA2_HUMAN
GSKFTVRTRLLVRLQE

SEQ ID NO: 28649 - protein, 16 aa, Homo sapiens
  ( 338 )...( 353 ): >STA2_HUMAN
SKFTVRTRLLVRLQEG

SEQ ID NO: 28650 - protein, 16 aa, Homo sapiens
  ( 339 )...( 354 ): >STA2_HUMAN
KFTVRTRLLVRLQEGN

SEQ ID NO: 28651 - protein, 16 aa, Homo sapiens
  ( 370 )...( 385 ): >STA2_HUMAN
LQGFRKFNILTSNQKT

SEQ ID NO: 28652 - protein, 16 aa, Homo sapiens
  ( 371 )...( 386 ): >STA2_HUMAN
QGFRKFNILTSNQKTL

SEQ ID NO: 28653 - protein, 16 aa, Homo sapiens
  ( 516 )...( 531 ): >STA2_HUMAN
QLSMLRNKLFGQNCRT

SEQ ID NO: 28654 - protein, 16 aa, Homo sapiens
  ( 575 )...( 590 ): >STA2_HUMAN
GRIMGFVSRSQERRLL

SEQ ID NO: 28655 - protein, 16 aa, Homo sapiens
  ( 577 )...( 592 ): >STA2_HUMAN
IMGFVSRSQERRLLKK

SEQ ID NO: 28656 - protein, 16 aa, Homo sapiens
  ( 578 )...( 593 ): >STA2_HUMAN
MGFVSRSQERRLLKKT

SEQ ID NO: 28657 - protein, 16 aa, Homo sapiens
  ( 579 )...( 594 ): >STA2_HUMAN
GFVSRSQERRLLKKTM

SEQ ID NO: 28658 - protein, 16 aa, Homo sapiens
  ( 581 )...( 596 ): >STA2_HUMAN
VSRSQERRLLKKTMSG

SEQ ID NO: 28659 - protein, 16 aa, Homo sapiens
  ( 582 )...( 597 ): >STA2_HUMAN
SRSQERRLLKKTMSGT

SEQ ID NO: 28660 - protein, 16 aa, Homo sapiens
  ( 583 )...( 598 ): >STA2_HUMAN
RSQERRLLKKTMSGTF

SEQ ID NO: 28661 - protein, 16 aa, Homo sapiens
  ( 584 )...( 599 ): >STA2_HUMAN
SQERRLLKKTMSGTFL

SEQ ID NO: 28662 - protein, 16 aa, Homo sapiens
  ( 585 )...( 600 ): >STA2_HUMAN
QERRLLKKTMSGTFLL

SEQ ID NO: 28663 - protein, 16 aa, Homo sapiens
  ( 586 )...( 601 ): >STA2_HUMAN
ERRLLKKTMSGTFLLR

SEQ ID NO: 28664 - protein, 16 aa, Homo sapiens
  ( 587 )...( 602 ): >STA2_HUMAN
RRLLKKTMSGTFLLRF

SEQ ID NO: 28665 - protein, 16 aa, Homo sapiens
  ( 588 )...( 603 ): >STA2_HUMAN
RLLKKTMSGTFLLRFS

SEQ ID NO: 28666 - protein, 16 aa, Homo sapiens
  ( 335 )...( 350 ): >STA3_HUMAN
RPLVIKTGVQFTTKVR

SEQ ID NO: 28667 - protein, 16 aa, Homo sapiens
  ( 336 )...( 351 ): >STA3_HUMAN
PLVIKTGVQFTTKVRL

SEQ ID NO: 28668 - protein, 16 aa, Homo sapiens
  ( 337 )...( 352 ): >STA3_HUMAN
LVIKTGVQFTTKVRLL

SEQ ID NO: 28669 - protein, 16 aa, Homo sapiens
  ( 339 )...( 354 ): >STA3_HUMAN
IKTGVQFTTKVRLLVK

SEQ ID NO: 28670 - protein, 16 aa, Homo sapiens
  ( 340 )...( 355 ): >STA3_HUMAN
KTGVQFTTKVRLLVKF

SEQ ID NO: 28671 - protein, 16 aa, Homo sapiens
  ( 341 )...( 356 ): >STA3_HUMAN
TGVQFTTKVRLLVKFP

SEQ ID NO: 28672 - protein, 16 aa, Homo sapiens
  ( 375 )...( 390 ): >STA3_HUMAN
VAALRGSRKFNILGTN

SEQ ID NO: 28673 - protein, 16 aa, Homo sapiens
  ( 376 )...( 391 ): >STA3_HUMAN
AALRGSRKFNILGTNT

SEQ ID NO: 28674 - protein, 16 aa, Homo sapiens
  ( 377 )...( 392 ): >STA3_HUMAN
ALRGSRKFNILGTNTK

SEQ ID NO: 28675 - protein, 16 aa, Homo sapiens
  ( 378 )...( 393 ): >STA3_HUMAN
LRGSRKFNILGTNTKV

SEQ ID NO: 28676 - protein, 16 aa, Homo sapiens
  ( 379 )...( 394 ): >STA3_HUMAN
RGSRKFNILGTNTKVM

SEQ ID NO: 28677 - protein, 16 aa, Homo sapiens
  ( 380 )...( 395 ): >STA3_HUMAN
GSRKFNILGTNTKVMN

SEQ ID NO: 28678 - protein, 16 aa, Homo sapiens
  ( 381 )...( 396 ): >STA3_HUMAN
SRKFNILGTNTKVMNM

SEQ ID NO: 28679 - protein, 16 aa, Homo sapiens
  ( 408 )...( 423 ): >STA3_HUMAN
FKHLTLREQRCGNGGR

SEQ ID NO: 28680 - protein, 16 aa, Homo sapiens
  ( 409 )...( 424 ): >STA3_HUMAN
KHLTLREQRCGNGGRA

SEQ ID NO: 28681 - protein, 16 aa, Homo sapiens
  ( 595 )...( 610 ): >STA3_HUMAN
RAILSTKPPGTFLLRF

SEQ ID NO: 28682 - protein, 16 aa, Homo sapiens
  ( 76 )...( 91 ): >STA4_HUMAN
NLLLIHNLKRIRKVLQ

SEQ ID NO: 28683 - protein, 16 aa, Homo sapiens
  ( 77 )...( 92 ): >STA4_HUMAN
LLLIHNLKRIRKVLQG

SEQ ID NO: 28684 - protein, 16 aa, Homo sapiens
  ( 78 )...( 93 ): >STA4_HUMAN
LLIHNLKRIRKVLQGK

SEQ ID NO: 28685 - protein, 16 aa, Homo sapiens
  ( 79 )...( 94 ): >STA4_HUMAN
LIHNLKRIRKVLQGKF

SEQ ID NO: 28686 - protein, 16 aa, Homo sapiens
  ( 83 )...( 98 ): >STA4_HUMAN
LKRIRKVLQGKFHGNP

SEQ ID NO: 28687 - protein, 16 aa, Homo sapiens
  ( 84 )...( 99 ): >STA4_HUMAN
KRIRKVLQGKFHGNPM

SEQ ID NO: 28688 - protein, 16 aa, Homo sapiens
  ( 139 )...( 154 ): >STA4_HUMAN
RQRNVEHKVAAIKNSV

SEQ ID NO: 28689 - protein, 16 aa, Homo sapiens
  ( 328 )...( 343 ): >STA4_HUMAN
PQRPLVLKTLIQFTVK

SEQ ID NO: 28690 - protein, 16 aa, Homo sapiens
  ( 330 )...( 345 ): >STA4_HUMAN
RPLVLKTLIQFTVKLR

SEQ ID NO: 28691 - protein, 16 aa, Homo sapiens
  ( 343 )...( 358 ): >STA4_HUMAN
KLRLLIKLPELNYQVK

SEQ ID NO: 28692 - protein, 16 aa, Homo sapiens
  ( 345 )...( 360 ): >STA4_HUMAN
RLLIKLPELNYQVKVK

SEQ ID NO: 28693 - protein, 16 aa, Homo sapiens
  ( 359 )...( 374 ): >STA4_HUMAN
VKASIDKNVSTLSNRR

SEQ ID NO: 28694 - protein, 16 aa, Homo sapiens
  ( 369 )...( 384 ): >STA4_HUMAN
TLSNRRFVLCGTNVKA

SEQ ID NO: 28695 - protein, 16 aa, Homo sapiens
  ( 584 )...( 599 ): >STA4_HUMAN
RLLLKDKMPGTFLLRF

SEQ ID NO: 28696 - protein, 16 aa, Homo sapiens
  ( 93 )...( 108 ): >STA6_HUMAN
LKLVATFRQILQGEKK

SEQ ID NO: 28697 - protein, 16 aa, Homo sapiens
  ( 94 )...( 109 ): >STA6_HUMAN
KLVATFRQILQGEKKA

SEQ ID NO: 28698 - protein, 16 aa, Homo sapiens
  ( 127 )...( 142 ): >STA6_HUMAN
ELKFKTGLRRLQHRVG

SEQ ID NO: 28699 - protein, 16 aa, Homo sapiens
  ( 128 )...( 143 ): >STA6_HUMAN
LKFKTGLRRLQHRVGE

SEQ ID NO: 28700 - protein, 16 aa, Homo sapiens
  ( 129 )...( 144 ): >STA6_HUMAN
KFKTGLRRLQHRVGEI

SEQ ID NO: 28701 - protein, 16 aa, Homo sapiens
  ( 130 )...( 145 ): >STA6_HUMAN
FKTGLRRLQHRVGEIH

SEQ ID NO: 28702 - protein, 16 aa, Homo sapiens
  ( 131 )...( 146 ): >STA6_HUMAN
KTGLRRLQHRVGEIHL

SEQ ID NO: 28703 - protein, 16 aa, Homo sapiens
  ( 133 )...( 148 ): >STA6_HUMAN
GLRRLQHRVGEIHLLR

SEQ ID NO: 28704 - protein, 16 aa, Homo sapiens
  ( 190 )...( 205 ): >STA6_HUMAN
LEAAKALVLKRIQIWK

SEQ ID NO: 28705 - protein, 16 aa, Homo sapiens
  ( 191 )...( 206 ): >STA6_HUMAN
EAAKALVLKRIQIWKR

SEQ ID NO: 28706 - protein, 16 aa, Homo sapiens
  ( 192 )...( 207 ): >STA6_HUMAN
AAKALVLKRIQIWKRQ

SEQ ID NO: 28707 - protein, 16 aa, Homo sapiens
  ( 193 )...( 208 ): >STA6_HUMAN
AKALVLKRIQIWKRQQ

SEQ ID NO: 28708 - protein, 16 aa, Homo sapiens
  ( 197 )...( 212 ): >STA6_HUMAN
VLKRIQIWKRQQQLAG

SEQ ID NO: 28709 - protein, 16 aa, Homo sapiens
  ( 199 )...( 214 ): >STA6_HUMAN
KRIQIWKRQQQLAGNG

SEQ ID NO: 28710 - protein, 16 aa, Homo sapiens
  ( 200 )...( 215 ): >STA6_HUMAN
RIQIWKRQQQLAGNGA

SEQ ID NO: 28711 - protein, 16 aa, Homo sapiens
  ( 279 )...( 294 ): >STA6_HUMAN
PPQVLKTQTKFQAGVR

SEQ ID NO: 28712 - protein, 16 aa, Homo sapiens
  ( 280 )...( 295 ): >STA6_HUMAN
PQVLKTQTKFQAGVRF

SEQ ID NO: 28713 - protein, 16 aa, Homo sapiens
  ( 281 )...( 296 ): >STA6_HUMAN
QVLKTQTKFQAGVRFL

SEQ ID NO: 28714 - protein, 16 aa, Homo sapiens
  ( 282 )...( 297 ): >STA6_HUMAN
VLKTQTKFQAGVRFLL

SEQ ID NO: 28715 - protein, 16 aa, Homo sapiens
  ( 283 )...( 298 ): >STA6_HUMAN
LKTQTKFQAGVRFLLG

SEQ ID NO: 28716 - protein, 16 aa, Homo sapiens
  ( 284 )...( 299 ): >STA6_HUMAN
KTQTKFQAGVRFLLGL

SEQ ID NO: 28717 - protein, 16 aa, Homo sapiens
  ( 285 )...( 300 ): >STA6_HUMAN
TQTKFQAGVRFLLGLR

SEQ ID NO: 28718 - protein, 16 aa, Homo sapiens
  ( 286 )...( 301 ): >STA6_HUMAN
QTKFQAGVRFLLGLRF

SEQ ID NO: 28719 - protein, 16 aa, Homo sapiens
  ( 287 )...( 302 ): >STA6_HUMAN
TKFQAGVRFLLGLRFL

SEQ ID NO: 28720 - protein, 16 aa, Homo sapiens
  ( 288 )...( 303 ): >STA6_HUMAN
KFQAGVRFLLGLRFLG

SEQ ID NO: 28721 - protein, 16 aa, Homo sapiens
  ( 292 )...( 307 ): >STA6_HUMAN
GVRFLLGLRFLGAPAK

SEQ ID NO: 28722 - protein, 16 aa, Homo sapiens
  ( 293 )...( 308 ): >STA6_HUMAN
VRFLLGLRFLGAPAKP

SEQ ID NO: 28723 - protein, 16 aa, Homo sapiens
  ( 355 )...( 370 ): >STA6_HUMAN
CCSALFKNLLLKKIKR

SEQ ID NO: 28724 - protein, 16 aa, Homo sapiens
  ( 356 )...( 371 ): >STA6_HUMAN
CSALFKNLLLKKIKRC

SEQ ID NO: 28725 - protein, 16 aa, Homo sapiens
  ( 357 )...( 372 ): >STA6_HUMAN
SALFKNLLLKKIKRCE

SEQ ID NO: 28726 - protein, 16 aa, Homo sapiens
  ( 361 )...( 376 ): >STA6_HUMAN
KNLLLKKIKRCERKGT

SEQ ID NO: 28727 - protein, 16 aa, Homo sapiens
  ( 362 )...( 377 ): >STA6_HUMAN
NLLLKKIKRCERKGTE

SEQ ID NO: 28728 - protein, 16 aa, Homo sapiens
  ( 363 )...( 378 ): >STA6_HUMAN
LLLKKIKRCERKGTES

SEQ ID NO: 28729 - protein, 16 aa, Homo sapiens
  ( 364 )...( 379 ): >STA6_HUMAN
LLKKIKRCERKGTESV

SEQ ID NO: 28730 - protein, 16 aa, Homo sapiens
  ( 365 )...( 380 ): >STA6_HUMAN
LKKIKRCERKGTESVT

SEQ ID NO: 28731 - protein, 16 aa, Homo sapiens
  ( 525 )...( 540 ): >STA6_HUMAN
TKRCLRSYWSDRLIIG

SEQ ID NO: 28732 - protein, 16 aa, Homo sapiens
  ( 205 )...( 220 ): >SUT3_HUMAN
KLSGSNNANKRQKIAQ

SEQ ID NO: 28733 - protein, 16 aa, Homo sapiens
  ( 368 )...( 383 ): >SUT3_HUMAN
IREAIRRYSHRIGPLS

SEQ ID NO: 28734 - protein, 16 aa, Homo sapiens
  ( 91 )...( 106 ): >SX10_HUMAN
PVRVNGASKSKPHVKR

SEQ ID NO: 28735 - protein, 16 aa, Homo sapiens
  ( 92 )...( 107 ): >SX10_HUMAN
VRVNGASKSKPHVKRP

SEQ ID NO: 28736 - protein, 16 aa, Homo sapiens
  ( 93 )...( 108 ): >SX10_HUMAN
RVNGASKSKPHVKRPM

SEQ ID NO: 28737 - protein, 16 aa, Homo sapiens
  ( 173 )...( 188 ): >SX10_HUMAN
YQPRRRKNGKAAQGEA

SEQ ID NO: 28738 - protein, 16 aa, Homo sapiens
  ( 94 )...( 109 ): >T2D4_HUMAN
RQTLLAVLQFLRQSKL

SEQ ID NO: 28739 - protein, 16 aa, Homo sapiens
  ( 95 )...( 110 ): >T2D4_HUMAN
QTLLAVLQFLRQSKLR

SEQ ID NO: 28740 - protein, 16 aa, Homo sapiens
  ( 296 )...( 311 ): >T2D4_HUMAN
TMLDFRTSKFVLRISR

SEQ ID NO: 28741 - protein, 16 aa, Homo sapiens
  ( 363 )...( 378 ): >T2D4_HUMAN
AKREANKSKVFFGLLK

SEQ ID NO: 28742 - protein, 16 aa, Homo sapiens
  ( 364 )...( 379 ): >T2D4_HUMAN
KREANKSKVFFGLLKE

SEQ ID NO: 28743 - protein, 16 aa, Homo sapiens
  ( 396 )...( 411 ): >T2D4_HUMAN
EEGKPKKKKPKKDSIG

SEQ ID NO: 28744 - protein, 16 aa, Homo sapiens
  ( 397 )...( 412 ): >T2D4_HUMAN
EGKPKKKKPKKDSIGS

SEQ ID NO: 28745 - protein, 16 aa, Homo sapiens
  ( 398 )...( 413 ): >T2D4_HUMAN
GKPKKKKPKKDSIGSK

SEQ ID NO: 28746 - protein, 16 aa, Homo sapiens
  ( 399 )...( 414 ): >T2D4_HUMAN
KPKKKKPKKDSIGSKS

SEQ ID NO: 28747 - protein, 16 aa, Homo sapiens
  ( 400 )...( 415 ): >T2D4_HUMAN
PKKKKPKKDSIGSKSK

SEQ ID NO: 28748 - protein, 16 aa, Homo sapiens
  ( 402 )...( 417 ): >T2D4_HUMAN
KKKPKKDSIGSKSKKQ

SEQ ID NO: 28749 - protein, 16 aa, Homo sapiens
  ( 403 )...( 418 ): >T2D4_HUMAN
KKPKKDSIGSKSKKQD

SEQ ID NO: 28750 - protein, 16 aa, Homo sapiens
  ( 438 )...( 453 ): >T2D4_HUMAN
LDKIMNMKETTKRVRL

SEQ ID NO: 28751 - protein, 16 aa, Homo sapiens
  ( 439 )...( 454 ): >T2D4_HUMAN
DKIMNMKETTKRVRLG

SEQ ID NO: 28752 - protein, 16 aa, Homo sapiens
  ( 440 )...( 455 ): >T2D4_HUMAN
KIMNMKETTKRVRLGP

SEQ ID NO: 28753 - protein, 16 aa, Homo sapiens
  ( 490 )...( 505 ): >T2D4_HUMAN
ADSTVRVWSVTPKKLR

SEQ ID NO: 28754 - protein, 16 aa, Homo sapiens
  ( 491 )...( 506 ): >T2D4_HUMAN
DSTVRVWSVTPKKLRS

SEQ ID NO: 28755 - protein, 16 aa, Homo sapiens
  ( 492 )...( 507 ): >T2D4_HUMAN
STVRVWSVTPKKLRSV

SEQ ID NO: 28756 - protein, 16 aa, Homo sapiens
  ( 493 )...( 508 ): >T2D4_HUMAN
TVRVWSVTPKKLRSVK

SEQ ID NO: 28757 - protein, 16 aa, Homo sapiens
  ( 494 )...( 509 ): >T2D4_HUMAN
VRVWSVTPKKLRSVKQ

SEQ ID NO: 28758 - protein, 16 aa, Homo sapiens
  ( 495 )...( 510 ): >T2D4_HUMAN
RVWSVTPKKLRSVKQA

SEQ ID NO: 28759 - protein, 16 aa, Homo sapiens
  ( 496 )...( 511 ): >T2D4_HUMAN
VWSVTPKKLRSVKQAS

SEQ ID NO: 28760 - protein, 16 aa, Homo sapiens
  ( 122 )...( 137 ): >T2D7_HUMAN
LTAPNYRLKSLQKKAS

SEQ ID NO: 28761 - protein, 16 aa, Homo sapiens
  ( 123 )...( 138 ): >T2D7_HUMAN
TAPNYRLKSLQKKAST

SEQ ID NO: 28762 - protein, 16 aa, Homo sapiens
  ( 126 )...( 141 ): >T2D7_HUMAN
NYRLKSLQKKASTSAG

SEQ ID NO: 28763 - protein, 16 aa, Homo sapiens
  ( 127 )...( 142 ): >T2D7_HUMAN
YRLKSLQKKASTSAGR

SEQ ID NO: 28764 - protein, 16 aa, Homo sapiens
  ( 128 )...( 143 ): >T2D7_HUMAN
RLKSLQKKASTSAGRI

SEQ ID NO: 28765 - protein, 16 aa, Homo sapiens
  ( 129 )...( 144 ): >T2D7_HUMAN
LKSLQKKASTSAGRIT

SEQ ID NO: 28766 - protein, 16 aa, Homo sapiens
  ( 130 )...( 145 ): >T2D7_HUMAN
KSLQKKASTSAGRITV

SEQ ID NO: 28767 - protein, 16 aa, Homo sapiens
  ( 132 )...( 147 ): >T2D7_HUMAN
LQKKASTSAGRITVPR

SEQ ID NO: 28768 - protein, 16 aa, Homo sapiens
  ( 133 )...( 148 ): >T2D7_HUMAN
QKKASTSAGRITVPRL

SEQ ID NO: 28769 - protein, 16 aa, Homo sapiens
  ( 134 )...( 149 ): >T2D7_HUMAN
KKASTSAGRITVPRLS

SEQ ID NO: 28770 - protein, 16 aa, Homo sapiens
  ( 142 )...( 157 ): >T2D7_HUMAN
RITVPRLSVGSVTSRP

SEQ ID NO: 28771 - protein, 16 aa, Homo sapiens
  ( 47 )...( 62 ): >T2DA_HUMAN
GGRLSPENNQVLTKKK

SEQ ID NO: 28772 - protein, 16 aa, Homo sapiens
  ( 48 )...( 63 ): >T2DA_HUMAN
GRLSPENNQVLTKKKL

SEQ ID NO: 28773 - protein, 16 aa, Homo sapiens
  ( 141 )...( 156 ): >T2DA_HUMAN
KACTTEAHKQRMALIR

SEQ ID NO: 28774 - protein, 16 aa, Homo sapiens
  ( 142 )...( 157 ): >T2DA_HUMAN
ACTTEAHKQRMALIRK

SEQ ID NO: 28775 - protein, 16 aa, Homo sapiens
  ( 145 )...( 160 ): >T2DA_HUMAN
TEAHKQRMALIRKTTK

SEQ ID NO: 28776 - protein, 16 aa, Homo sapiens
  ( 146 )...( 161 ): >T2DA_HUMAN
EAHKQRMALIRKTTKK

SEQ ID NO: 28777 - protein, 15 aa, Homo sapiens
  ( 147 )...( 162 ): >T2DA_HUMAN
AHKQRMALIRKTTKK

SEQ ID NO: 28778 - protein, 13 aa, Homo sapiens
  ( 149 )...( 164 ): >T2DA_HUMAN
KQRMALIRKTTKK

SEQ ID NO: 28779 - protein, 12 aa, Homo sapiens
  ( 150 )...( 165 ): >T2DA_HUMAN
QRMALIRKTTKK

SEQ ID NO: 28780 - protein, 16 aa, Homo sapiens
  ( 4 )...( 19 ): >T2EB_HUMAN
SLLRERELFKKRALST

SEQ ID NO: 28781 - protein, 16 aa, Homo sapiens
  ( 6 )...( 21 ): >T2EB_HUMAN
LRERELFKKRALSTPV

SEQ ID NO: 28782 - protein, 16 aa, Homo sapiens
  ( 7 )...( 22 ): >T2EB_HUMAN
RERELFKKRALSTPVV

SEQ ID NO: 28783 - protein, 16 aa, Homo sapiens
  ( 9 )...( 24 ): >T2EB_HUMAN
RELFKKRALSTPVVEK

SEQ ID NO: 28784 - protein, 16 aa, Homo sapiens
  ( 10 )...( 25 ): >T2EB_HUMAN
ELFKKRALSTPVVEKR

SEQ ID NO: 28785 - protein, 16 aa, Homo sapiens
  ( 11 )...( 26 ): >T2EB_HUMAN
LFKKRALSTPVVEKRS

SEQ ID NO: 28786 - protein, 16 aa, Homo sapiens
  ( 12 )...( 27 ): >T2EB_HUMAN
FKKRALSTPVVEKRSA

SEQ ID NO: 28787 - protein, 16 aa, Homo sapiens
  ( 13 )...( 28 ): >T2EB_HUMAN
KKRALSTPVVEKRSAS

SEQ ID NO: 28788 - protein, 16 aa, Homo sapiens
  ( 72 )...( 87 ): >T2EB_HUMAN
GYKFGVLAKIVNYMKT

SEQ ID NO: 28789 - protein, 16 aa, Homo sapiens
  ( 73 )...( 88 ): >T2EB_HUMAN
YKFGVLAKIVNYMKTR

SEQ ID NO: 28790 - protein, 16 aa, Homo sapiens
  ( 74 )...( 89 ): >T2EB_HUMAN
KFGVLAKIVNYMKTRH

SEQ ID NO: 28791 - protein, 16 aa, Homo sapiens
  ( 75 )...( 90 ): >T2EB_HUMAN
FGVLAKIVNYMKTRHQ

SEQ ID NO: 28792 - protein, 16 aa, Homo sapiens
  ( 76 )...( 91 ): >T2EB_HUMAN
GVLAKIVNYMKTRHQR

SEQ ID NO: 28793 - protein, 16 aa, Homo sapiens
  ( 77 )...( 92 ): >T2EB_HUMAN
VLAKIVNYMKTRHQRG

SEQ ID NO: 28794 - protein, 16 aa, Homo sapiens
  ( 78 )...( 93 ): >T2EB_HUMAN
LAKIVNYMKTRHQRGD

SEQ ID NO: 28795 - protein, 16 aa, Homo sapiens
  ( 79 )...( 94 ): >T2EB_HUMAN
AKIVNYMKTRHQRGDT

SEQ ID NO: 28796 - protein, 16 aa, Homo sapiens
  ( 244 )...( 259 ): >T2EB_HUMAN
SMQESGPKKVAPIQRR

SEQ ID NO: 28797 - protein, 16 aa, Homo sapiens
  ( 245 )...( 260 ): >T2EB_HUMAN
MQESGPKKVAPIQRRK

SEQ ID NO: 28798 - protein, 16 aa, Homo sapiens
  ( 246 )...( 261 ): >T2EB_HUMAN
QESGPKKVAPIQRRKK

SEQ ID NO: 28799 - protein, 16 aa, Homo sapiens
  ( 247 )...( 262 ): >T2EB_HUMAN
ESGPKKVAPIQRRKKP

SEQ ID NO: 28800 - protein, 16 aa, Homo sapiens
  ( 248 )...( 263 ): >T2EB_HUMAN
SGPKKVAPIQRRKKPA

SEQ ID NO: 28801 - protein, 16 aa, Homo sapiens
  ( 249 )...( 264 ): >T2EB_HUMAN
GPKKVAPIQRRKKPAS

SEQ ID NO: 28802 - protein, 16 aa, Homo sapiens
  ( 13 )...( 28 ): >T2FA_HUMAN
EYVVRVPKNTTKKYNI

SEQ ID NO: 28803 - protein, 16 aa, Homo sapiens
  ( 14 )...( 29 ): >T2FA_HUMAN
YVVRVPKNTTKKYNIM

SEQ ID NO: 28804 - protein, 16 aa, Homo sapiens
  ( 15 )...( 30 ): >T2FA_HUMAN
VVRVPKNTTKKYNIMA

SEQ ID NO: 28805 - protein, 16 aa, Homo sapiens
  ( 16 )...( 31 ): >T2FA_HUMAN
VRVPKNTTKKYNIMAF

SEQ ID NO: 28806 - protein, 16 aa, Homo sapiens
  ( 97 )...( 112 ): >T2FA_HUMAN
PWLLRVNGKSGRKFKG

SEQ ID NO: 28807 - protein, 16 aa, Homo sapiens
  ( 98 )...( 113 ): >T2FA_HUMAN
WLLRVNGKSGRKFKGI

SEQ ID NO: 28808 - protein, 16 aa, Homo sapiens
  ( 99 )...( 114 ): >T2FA_HUMAN
LLRVNGKSGRKFKGIK

SEQ ID NO: 28809 - protein, 16 aa, Homo sapiens
  ( 100 )...( 115 ): >T2FA_HUMAN
LRVNGKSGRKFKGIKK

SEQ ID NO: 28810 - protein, 16 aa, Homo sapiens
  ( 101 )...( 116 ): >T2FA_HUMAN
RVNGKSGRKFKGIKKG

SEQ ID NO: 28811 - protein, 16 aa, Homo sapiens
  ( 102 )...( 117 ): >T2FA_HUMAN
VNGKSGRKFKGIKKGG

SEQ ID NO: 28812 - protein, 16 aa, Homo sapiens
  ( 103 )...( 118 ): >T2FA_HUMAN
NGKSGRKFKGIKKGGV

SEQ ID NO: 28813 - protein, 16 aa, Homo sapiens
  ( 105 )...( 120 ): >T2FA_HUMAN
KSGRKFKGIKKGGVTE

SEQ ID NO: 28814 - protein, 16 aa, Homo sapiens
  ( 106 )...( 121 ): >T2FA_HUMAN
SGRKFKGIKKGGVTEN

SEQ ID NO: 28815 - protein, 16 aa, Homo sapiens
  ( 107 )...( 122 ): >T2FA_HUMAN
GRKFKGIKKGGVTENT

SEQ ID NO: 28816 - protein, 16 aa, Homo sapiens
  ( 108 )...( 123 ): >T2FA_HUMAN
RKFKGIKKGGVTENTS

SEQ ID NO: 28817 - protein, 16 aa, Homo sapiens
  ( 225 )...( 240 ): >T2FA_HUMAN
GEEGGRVPKAKKKAPL

SEQ ID NO: 28818 - protein, 16 aa, Homo sapiens
  ( 226 )...( 241 ): >T2FA_HUMAN
EEGGRVPKAKKKAPLA

SEQ ID NO: 28819 - protein, 16 aa, Homo sapiens
  ( 227 )...( 242 ): >T2FA_HUMAN
EGGRVPKAKKKAPLAK

SEQ ID NO: 28820 - protein, 16 aa, Homo sapiens
  ( 231 )...( 246 ): >T2FA_HUMAN
VPKAKKKAPLAKGGRK

SEQ ID NO: 28821 - protein, 16 aa, Homo sapiens
  ( 239 )...( 254 ): >T2FA_HUMAN
PLAKGGRKKKKKKGSD

SEQ ID NO: 28822 - protein, 16 aa, Homo sapiens
  ( 364 )...( 379 ): >T2FA_HUMAN
AKKKTPPKRERKPSGG

SEQ ID NO: 28823 - protein, 16 aa, Homo sapiens
  ( 365 )...( 380 ): >T2FA_HUMAN
KKKTPPKRERKPSGGS

SEQ ID NO: 28824 - protein, 16 aa, Homo sapiens
  ( 367 )...( 382 ): >T2FA_HUMAN
KTPPKRERKPSGGSSR

SEQ ID NO: 28825 - protein, 16 aa, Homo sapiens
  ( 398 )...( 413 ): >T2FA_HUMAN
SSTLRAAASKLEQGKR

SEQ ID NO: 28826 - protein, 16 aa, Homo sapiens
  ( 399 )...( 414 ): >T2FA_HUMAN
STLRAAASKLEQGKRV

SEQ ID NO: 28827 - protein, 16 aa, Homo sapiens
  ( 400 )...( 415 ): >T2FA_HUMAN
TLRAAASKLEQGKRVS

SEQ ID NO: 28828 - protein, 16 aa, Homo sapiens
  ( 407 )...( 422 ): >T2FA_HUMAN
KLEQGKRVSEMPAAKR

SEQ ID NO: 28829 - protein, 16 aa, Homo sapiens
  ( 409 )...( 424 ): >T2FA_HUMAN
EQGKRVSEMPAAKRLR

SEQ ID NO: 28830 - protein, 16 aa, Homo sapiens
  ( 410 )...( 425 ): >T2FA_HUMAN
QGKRVSEMPAAKRLRL

SEQ ID NO: 28831 - protein, 16 aa, Homo sapiens
  ( 411 )...( 426 ): >T2FA_HUMAN
GKRVSEMPAAKRLRLD

SEQ ID NO: 28832 - protein, 16 aa, Homo sapiens
  ( 412 )...( 427 ): >T2FA_HUMAN
KRVSEMPAAKRLRLDT

SEQ ID NO: 28833 - protein, 16 aa, Homo sapiens
  ( 420 )...( 435 ): >T2FA_HUMAN
AKRLRLDTGPQSLSGK

SEQ ID NO: 28834 - protein, 16 aa, Homo sapiens
  ( 421 )...( 436 ): >T2FA_HUMAN
KRLRLDTGPQSLSGKS

SEQ ID NO: 28835 - protein, 16 aa, Homo sapiens
  ( 458 )...( 473 ): >T2FA_HUMAN
AVRRYLTRKPMTTKDL

SEQ ID NO: 28836 - protein, 16 aa, Homo sapiens
  ( 459 )...( 474 ): >T2FA_HUMAN
VRRYLTRKPMTTKDLL

SEQ ID NO: 28837 - protein, 16 aa, Homo sapiens
  ( 463 )...( 478 ): >T2FA_HUMAN
LTRKPMTTKDLLKKFQ

SEQ ID NO: 28838 - protein, 16 aa, Homo sapiens
  ( 464 )...( 479 ): >T2FA_HUMAN
TRKPMTTKDLLKKFQT

SEQ ID NO: 28839 - protein, 16 aa, Homo sapiens
  ( 466 )...( 481 ): >T2FA_HUMAN
KPMTTKDLLKKFQTKK

SEQ ID NO: 28840 - protein, 16 aa, Homo sapiens
  ( 490 )...( 505 ): >T2FA_HUMAN
VNVLAQILKRLNPERK

SEQ ID NO: 28841 - protein, 16 aa, Homo sapiens
  ( 492 )...( 507 ): >T2FA_HUMAN
VLAQILKRLNPERKMI

SEQ ID NO: 28842 - protein, 16 aa, Homo sapiens
  ( 15 )...( 30 ): >TAL2_HUMAN
QQNVNSAFAKLRKLIP

SEQ ID NO: 28843 - protein, 16 aa, Homo sapiens
  ( 16 )...( 31 ): >TAL2_HUMAN
QNVNSAFAKLRKLIPT

SEQ ID NO: 28844 - protein, 16 aa, Homo sapiens
  ( 23 )...( 38 ): >TAL2_HUMAN
AKLRKLIPTHPPDKKL

SEQ ID NO: 28845 - protein, 16 aa, Homo sapiens
  ( 180 )...( 195 ): >TAL_HUMAN
DGPHTKVVRRIFTNSR

SEQ ID NO: 28846 - protein, 16 aa, Homo sapiens
  ( 181 )...( 196 ): >TAL_HUMAN
GPHTKVVRRIFTNSRE

SEQ ID NO: 28847 - protein, 16 aa, Homo sapiens
  ( 219 )...( 234 ): >TAL_HUMAN
PDKKLSKNEILRLAMK

SEQ ID NO: 28848 - protein, 16 aa, Homo sapiens
  ( 221 )...( 236 ): >TAL_HUMAN
KKLSKNEILRLAMKYI

SEQ ID NO: 28849 - protein, 16 aa, Homo sapiens
  ( 58 )...( 73 ): >TAP4_HUMAN
RRRMQSINAGFQSLKT

SEQ ID NO: 28850 - protein, 16 aa, Homo sapiens
  ( 59 )...( 74 ): >TAP4_HUMAN
RRMQSINAGFQSLKTL

SEQ ID NO: 28851 - protein, 16 aa, Homo sapiens
  ( 112 )...( 127 ): >TAP4_HUMAN
QLKRFIQELSGSSPKR

SEQ ID NO: 28852 - protein, 16 aa, Homo sapiens
  ( 292 )...( 307 ): >TAP4_HUMAN
QRRAVIVKPVRSCPEA

SEQ ID NO: 28853 - protein, 16 aa, Homo sapiens
  ( 116 )...( 131 ): >TBX3_HUMAN
FHKRGTEMVITKSGRR

SEQ ID NO: 28854 - protein, 16 aa, Homo sapiens
  ( 117 )...( 132 ): >TBX3_HUMAN
HKRGTEMVITKSGRRM

SEQ ID NO: 28855 - protein, 16 aa, Homo sapiens
  ( 118 )...( 133 ): >TBX3_HUMAN
KRGTEMVITKSGRRMF

SEQ ID NO: 28856 - protein, 16 aa, Homo sapiens
  ( 119 )...( 134 ): >TBX3_HUMAN
RGTEMVITKSGRRMFP

SEQ ID NO: 28857 - protein, 16 aa, Homo sapiens
  ( 123 )...( 138 ): >TBX3_HUMAN
MVITKSGRRMFPPFKV

SEQ ID NO: 28858 - protein, 16 aa, Homo sapiens
  ( 124 )...( 139 ): >TBX3_HUMAN
VITKSGRRMFPPFKVR

SEQ ID NO: 28859 - protein, 16 aa, Homo sapiens
  ( 136 )...( 151 ): >TBX3_HUMAN
FKVRCSGLDKKAKYIL

SEQ ID NO: 28860 - protein, 16 aa, Homo sapiens
  ( 137 )...( 152 ): >TBX3_HUMAN
KVRCSGLDKKAKYILL

SEQ ID NO: 28861 - protein, 16 aa, Homo sapiens
  ( 138 )...( 153 ): >TBX3_HUMAN
VRCSGLDKKAKYILLM

SEQ ID NO: 28862 - protein, 16 aa, Homo sapiens
  ( 305 )...( 320 ): >TBX3_HUMAN
DTGNGRREKRKQLTLQ

SEQ ID NO: 28863 - protein, 16 aa, Homo sapiens
  ( 306 )...( 321 ): >TBX3_HUMAN
TGNGRREKRKQLTLQS

SEQ ID NO: 28864 - protein, 16 aa, Homo sapiens
  ( 307 )...( 322 ): >TBX3_HUMAN
GNGRREKRKQLTLQSM

SEQ ID NO: 28865 - protein, 16 aa, Homo sapiens
  ( 4 )...( 19 ): >TCE1_HUMAN
EVVRFAKKMDKMVQKK

SEQ ID NO: 28866 - protein, 16 aa, Homo sapiens
  ( 10 )...( 25 ): >TCE1_HUMAN
KKMDKMVQKKNAAGAL

SEQ ID NO: 28867 - protein, 16 aa, Homo sapiens
  ( 14 )...( 29 ): >TCE1_HUMAN
KMVQKKNAAGALDLLK

SEQ ID NO: 28868 - protein, 16 aa, Homo sapiens
  ( 40 )...( 55 ): >TCE1_HUMAN
LLQSTRIGMSVNAIRK

SEQ ID NO: 28869 - protein, 16 aa, Homo sapiens
  ( 41 )...( 56 ): >TCE1_HUMAN
LQSTRIGMSVNAIRKQ

SEQ ID NO: 28870 - protein, 16 aa, Homo sapiens
  ( 42 )...( 57 ): >TCE1_HUMAN
QSTRIGMSVNAIRKQS

SEQ ID NO: 28871 - protein, 16 aa, Homo sapiens
  ( 43 )...( 58 ): >TCE1_HUMAN
STRIGMSVNAIRKQST

SEQ ID NO: 28872 - protein, 16 aa, Homo sapiens
  ( 62 )...( 77 ): >TCE1_HUMAN
VTSLAKSLIKSWKKLL

SEQ ID NO: 28873 - protein, 16 aa, Homo sapiens
  ( 139 )...( 154 ): >TCE1_HUMAN
SVRLKCREMLAAALRT

SEQ ID NO: 28874 - protein, 16 aa, Homo sapiens
  ( 140 )...( 155 ): >TCE1_HUMAN
VRLKCREMLAAALRTG

SEQ ID NO: 28875 - protein, 16 aa, Homo sapiens
  ( 264 )...( 279 ): >TCE1_HUMAN
GKCKKKNCTYTQVQTR

SEQ ID NO: 28876 - protein, 16 aa, Homo sapiens
  ( 265 )...( 280 ): >TCE1_HUMAN
KCKKKNCTYTQVQTRS

SEQ ID NO: 28877 - protein, 16 aa, Homo sapiens
  ( 7 )...( 22 ): >TCE2_HUMAN
EIARIARRLDKMVTKK

SEQ ID NO: 28878 - protein, 16 aa, Homo sapiens
  ( 8 )...( 23 ): >TCE2_HUMAN
IARIARRLDKMVTKKS

SEQ ID NO: 28879 - protein, 16 aa, Homo sapiens
  ( 9 )...( 24 ): >TCE2_HUMAN
ARIARRLDKMVTKKSA

SEQ ID NO: 28880 - protein, 16 aa, Homo sapiens
  ( 10 )...( 25 ): >TCE2_HUMAN
RIARRLDKMVTKKSAE

SEQ ID NO: 28881 - protein, 16 aa, Homo sapiens
  ( 11 )...( 26 ): >TCE2_HUMAN
IARRLDKMVTKKSAEG

SEQ ID NO: 28882 - protein, 16 aa, Homo sapiens
  ( 12 )...( 27 ): >TCE2_HUMAN
ARRLDKMVTKKSAEGA

SEQ ID NO: 28883 - protein, 16 aa, Homo sapiens
  ( 13 )...( 28 ): >TCE2_HUMAN
RRLDKMVTKKSAEGAM

SEQ ID NO: 28884 - protein, 16 aa, Homo sapiens
  ( 43 )...( 58 ): >TCE2_HUMAN
LLQSTRVGMSVNALRK

SEQ ID NO: 28885 - protein, 16 aa, Homo sapiens
  ( 44 )...( 59 ): >TCE2_HUMAN
LQSTRVGMSVNALRKQ

SEQ ID NO: 28886 - protein, 16 aa, Homo sapiens
  ( 45 )...( 60 ): >TCE2_HUMAN
QSTRVGMSVNALRKQS

SEQ ID NO: 28887 - protein, 16 aa, Homo sapiens
  ( 46 )...( 61 ): >TCE2_HUMAN
STRVGMSVNALRKQSS

SEQ ID NO: 28888 - protein, 16 aa, Homo sapiens
  ( 73 )...( 88 ): >TCE2_HUMAN
IKSWKKLLDASDAKAR

SEQ ID NO: 28889 - protein, 16 aa, Homo sapiens
  ( 77 )...( 92 ): >TCE2_HUMAN
KKLLDASDAKARERGR

SEQ ID NO: 28890 - protein, 16 aa, Homo sapiens
  ( 86 )...( 101 ): >TCE2_HUMAN
KARERGRGMPLPTSSR

SEQ ID NO: 28891 - protein, 16 aa, Homo sapiens
  ( 112 )...( 127 ): >TCE2_HUMAN
KRPELPRAPSTPRITT

SEQ ID NO: 28892 - protein, 16 aa, Homo sapiens
  ( 262 )...( 277 ): >TCE2_HUMAN
GKCRKKNCTYTQVQTR

SEQ ID NO: 28893 - protein, 16 aa, Homo sapiens
  ( 263 )...( 278 ): >TCE2_HUMAN
KCRKKNCTYTQVQTRS

SEQ ID NO: 28894 - protein, 16 aa, Homo sapiens
  ( 6 )...( 21 ): >TCE3_HUMAN
ELLRIAKKLEKMVARK

SEQ ID NO: 28895 - protein, 16 aa, Homo sapiens
  ( 7 )...( 22 ): >TCE3_HUMAN
LLRIAKKLEKMVARKN

SEQ ID NO: 28896 - protein, 16 aa, Homo sapiens
  ( 8 )...( 23 ): >TCE3_HUMAN
LRIAKKLEKMVARKNT

SEQ ID NO: 28897 - protein, 16 aa, Homo sapiens
  ( 9 )...( 24 ): >TCE3_HUMAN
RIAKKLEKMVARKNTE

SEQ ID NO: 28898 - protein, 16 aa, Homo sapiens
  ( 10 )...( 25 ): >TCE3_HUMAN
IAKKLEKMVARKNTEG

SEQ ID NO: 28899 - protein, 16 aa, Homo sapiens
  ( 11 )...( 26 ): >TCE3_HUMAN
AKKLEKMVARKNTEGA

SEQ ID NO: 28900 - protein, 16 aa, Homo sapiens
  ( 12 )...( 27 ): >TCE3_HUMAN
KKLEKMVARKNTEGAL

SEQ ID NO: 28901 - protein, 16 aa, Homo sapiens
  ( 43 )...( 58 ): >TCE3_HUMAN
LQTTRIGVAVNGVRKH

SEQ ID NO: 28902 - protein, 16 aa, Homo sapiens
  ( 44 )...( 59 ): >TCE3_HUMAN
QTTRIGVAVNGVRKHC

SEQ ID NO: 28903 - protein, 16 aa, Homo sapiens
  ( 47 )...( 62 ): >TCE3_HUMAN
RIGVAVNGVRKHCSDK

SEQ ID NO: 28904 - protein, 16 aa, Homo sapiens
  ( 62 )...( 77 ): >TCE3_HUMAN
KEVVSLAKVLIKNWKR

SEQ ID NO: 28905 - protein, 16 aa, Homo sapiens
  ( 63 )...( 78 ): >TCE3_HUMAN
EVVSLAKVLIKNWKRL

SEQ ID NO: 28906 - protein, 16 aa, Homo sapiens
  ( 64 )...( 79 ): >TCE3_HUMAN
VVSLAKVLIKNWKRLL

SEQ ID NO: 28907 - protein, 16 aa, Homo sapiens
  ( 65 )...( 80 ): >TCE3_HUMAN
VSLAKVLIKNWKRLLD

SEQ ID NO: 28908 - protein, 16 aa, Homo sapiens
  ( 66 )...( 81 ): >TCE3_HUMAN
SLAKVLIKNWKRLLDS

SEQ ID NO: 28909 - protein, 16 aa, Homo sapiens
  ( 67 )...( 82 ): >TCE3_HUMAN
LAKVLIKNWKRLLDSP

SEQ ID NO: 28910 - protein, 16 aa, Homo sapiens
  ( 68 )...( 83 ): >TCE3_HUMAN
AKVLIKNWKRLLDSPG

SEQ ID NO: 28911 - protein, 16 aa, Homo sapiens
  ( 69 )...( 84 ): >TCE3_HUMAN
KVLIKNWKRLLDSPGP

SEQ ID NO: 28912 - protein, 16 aa, Homo sapiens
  ( 238 )...( 253 ): >TCE3_HUMAN
VRSRISNLKDPRNPGL

SEQ ID NO: 28913 - protein, 16 aa, Homo sapiens
  ( 245 )...( 260 ): >TCE3_HUMAN
LKDPRNPGLRRNVLSG

SEQ ID NO: 28914 - protein, 16 aa, Homo sapiens
  ( 257 )...( 272 ): >TCF7_HUMAN
SKAEKEAKKPTIKKPL

SEQ ID NO: 28915 - protein, 16 aa, Homo sapiens
  ( 258 )...( 273 ): >TCF7_HUMAN
KAEKEAKKPTIKKPLN

SEQ ID NO: 28916 - protein, 16 aa, Homo sapiens
  ( 261 )...( 276 ): >TCF7_HUMAN
KEAKKPTIKKPLNAFM

SEQ ID NO: 28917 - protein, 16 aa, Homo sapiens
  ( 296 )...( 311 ): >TCF7_HUMAN
AAINQILGRRWHALSR

SEQ ID NO: 28918 - protein, 16 aa, Homo sapiens
  ( 290 )...( 305 ): >TCF8_HUMAN
KKCISLIPVNGRPRTG

SEQ ID NO: 28919 - protein, 16 aa, Homo sapiens
  ( 293 )...( 308 ): >TCF8_HUMAN
ISLIPVNGRPRTGLKT

SEQ ID NO: 28920 - protein, 16 aa, Homo sapiens
  ( 294 )...( 309 ): >TCF8_HUMAN
SLIPVNGRPRTGLKTS

SEQ ID NO: 28921 - protein, 16 aa, Homo sapiens
  ( 295 )...( 310 ): >TCF8_HUMAN
LIPVNGRPRTGLKTSQ

SEQ ID NO: 28922 - protein, 16 aa, Homo sapiens
  ( 320 )...( 335 ): >TCF8_HUMAN
PGSPTRPQIRQKIENK

SEQ ID NO: 28923 - protein, 16 aa, Homo sapiens
  ( 321 )...( 336 ): >TCF8_HUMAN
GSPTRPQIRQKIENKP

SEQ ID NO: 28924 - protein, 16 aa, Homo sapiens
  ( 182 )...( 197 ): >TCL5_HUMAN
VPLQQQNKCTALVKNK

SEQ ID NO: 28925 - protein, 16 aa, Homo sapiens
  ( 279 )...( 294 ): >TCL5_HUMAN
WIKVGEAALCKQALKR

SEQ ID NO: 28926 - protein, 16 aa, Homo sapiens
  ( 280 )...( 295 ): >TCL5_HUMAN
IKVGEAALCKQALKRN

SEQ ID NO: 28927 - protein, 16 aa, Homo sapiens
  ( 281 )...( 296 ): >TCL5_HUMAN
KVGEAALCKQALKRNR

SEQ ID NO: 28928 - protein, 16 aa, Homo sapiens
  ( 282 )...( 297 ): >TCL5_HUMAN
VGEAALCKQALKRNRS

SEQ ID NO: 28929 - protein, 16 aa, Homo sapiens
  ( 283 )...( 298 ): >TCL5_HUMAN
GEAALCKQALKRNRSR

SEQ ID NO: 28930 - protein, 16 aa, Homo sapiens
  ( 284 )...( 299 ): >TCL5_HUMAN
EAALCKQALKRNRSRM

SEQ ID NO: 28931 - protein, 16 aa, Homo sapiens
  ( 410 )...( 425 ): >TCL5_HUMAN
LKKEFESVFCGKTGRR

SEQ ID NO: 28932 - protein, 16 aa, Homo sapiens
  ( 411 )...( 426 ): >TCL5_HUMAN
KKEFESVFCGKTGRRL

SEQ ID NO: 28933 - protein, 16 aa, Homo sapiens
  ( 412 )...( 427 ): >TCL5_HUMAN
KEFESVFCGKTGRRLK

SEQ ID NO: 28934 - protein, 16 aa, Homo sapiens
  ( 414 )...( 429 ): >TCL5_HUMAN
FESVFCGKTGRRLKLT

SEQ ID NO: 28935 - protein, 16 aa, Homo sapiens
  ( 415 )...( 430 ): >TCL5_HUMAN
ESVFCGKTGRRLKLTR

SEQ ID NO: 28936 - protein, 16 aa, Homo sapiens
  ( 416 )...( 431 ): >TCL5_HUMAN
SVFCGKTGRRLKLTRP

SEQ ID NO: 28937 - protein, 16 aa, Homo sapiens
  ( 417 )...( 432 ): >TCL5_HUMAN
VFCGKTGRRLKLTRPD

SEQ ID NO: 28938 - protein, 16 aa, Homo sapiens
  ( 418 )...( 433 ): >TCL5_HUMAN
FCGKTGRRLKLTRPDS

SEQ ID NO: 28939 - protein, 16 aa, Homo sapiens
  ( 419 )...( 434 ): >TCL5_HUMAN
CGKTGRRLKLTRPDSL

SEQ ID NO: 28940 - protein, 16 aa, Homo sapiens
  ( 420 )...( 435 ): >TCL5_HUMAN
GKTGRRLKLTRPDSLV

SEQ ID NO: 28941 - protein, 16 aa, Homo sapiens
  ( 421 )...( 436 ): >TCL5_HUMAN
KTGRRLKLTRPDSLVT

SEQ ID NO: 28942 - protein, 16 aa, Homo sapiens
  ( 422 )...( 437 ): >TCL5_HUMAN
TGRRLKLTRPDSLVTC

SEQ ID NO: 28943 - protein, 16 aa, Homo sapiens
  ( 423 )...( 438 ): >TCL5_HUMAN
GRRLKLTRPDSLVTCP

SEQ ID NO: 28944 - protein, 16 aa, Homo sapiens
  ( 424 )...( 439 ): >TCL5_HUMAN
RRLKLTRPDSLVTCPA

SEQ ID NO: 28945 - protein, 16 aa, Homo sapiens
  ( 107 )...( 122 ): >TDP1_HUMAN
RKGEKNGKGLRHFSMK

SEQ ID NO: 28946 - protein, 16 aa, Homo sapiens
  ( 108 )...( 123 ): >TDP1_HUMAN
KGEKNGKGLRHFSMKV

SEQ ID NO: 28947 - protein, 16 aa, Homo sapiens
  ( 114 )...( 129 ): >TDP1_HUMAN
KGLRHFSMKVCEKVQR

SEQ ID NO: 28948 - protein, 16 aa, Homo sapiens
  ( 115 )...( 130 ): >TDP1_HUMAN
GLRHFSMKVCEKVQRK

SEQ ID NO: 28949 - protein, 16 aa, Homo sapiens
  ( 116 )...( 131 ): >TDP1_HUMAN
LRHFSMKVCEKVQRKG

SEQ ID NO: 28950 - protein, 16 aa, Homo sapiens
  ( 117 )...( 132 ): >TDP1_HUMAN
RHFSMKVCEKVQRKGT

SEQ ID NO: 28951 - protein, 16 aa, Homo sapiens
  ( 95 )...( 110 ): >TDP2_HUMAN
AEATGWVPGDRKRARK

SEQ ID NO: 28952 - protein, 16 aa, Homo sapiens
  ( 96 )...( 111 ): >TDP2_HUMAN
EATGWVPGDRKRARKF

SEQ ID NO: 28953 - protein, 16 aa, Homo sapiens
  ( 97 )...( 112 ): >TDP2_HUMAN
ATGWVPGDRKRARKFI

SEQ ID NO: 28954 - protein, 16 aa, Homo sapiens
  ( 121 )...( 136 ): >TDP2_HUMAN
RSKKGDKNGKGLRHFS

SEQ ID NO: 28955 - protein, 16 aa, Homo sapiens
  ( 123 )...( 138 ): >TDP2_HUMAN
KKGDKNGKGLRHFSMK

SEQ ID NO: 28956 - protein, 16 aa, Homo sapiens
  ( 124 )...( 139 ): >TDP2_HUMAN
KGDKNGKGLRHFSMKV

SEQ ID NO: 28957 - protein, 16 aa, Homo sapiens
  ( 130 )...( 145 ): >TDP2_HUMAN
KGLRHFSMKVCEKVQR

SEQ ID NO: 28958 - protein, 16 aa, Homo sapiens
  ( 131 )...( 146 ): >TDP2_HUMAN
GLRHFSMKVCEKVQRK

SEQ ID NO: 28959 - protein, 16 aa, Homo sapiens
  ( 132 )...( 147 ): >TDP2_HUMAN
LRHFSMKVCEKVQRKG

SEQ ID NO: 28960 - protein, 16 aa, Homo sapiens
  ( 133 )...( 148 ): >TDP2_HUMAN
RHFSMKVCEKVQRKGT

SEQ ID NO: 28961 - protein, 16 aa, Homo sapiens
  ( 64 )...( 79 ): >TEA2_HUMAN
GRRKIILSDEGKMYGR

SEQ ID NO: 28962 - protein, 16 aa, Homo sapiens
  ( 74 )...( 89 ): >TEA2_HUMAN
GKMYGRNELIARYIKL

SEQ ID NO: 28963 - protein, 16 aa, Homo sapiens
  ( 77 )...( 92 ): >TEA2_HUMAN
YGRNELIARYIKLRTG

SEQ ID NO: 28964 - protein, 16 aa, Homo sapiens
  ( 78 )...( 93 ): >TEA2_HUMAN
GRNELIARYIKLRTGK

SEQ ID NO: 28965 - protein, 16 aa, Homo sapiens
  ( 79 )...( 94 ): >TEA2_HUMAN
RNELIARYIKLRTGKT

SEQ ID NO: 28966 - protein, 16 aa, Homo sapiens
  ( 80 )...( 95 ): >TEA2_HUMAN
NELIARYIKLRTGKTR

SEQ ID NO: 28967 - protein, 16 aa, Homo sapiens
  ( 81 )...( 96 ): >TEA2_HUMAN
ELIARYIKLRTGKTRT

SEQ ID NO: 28968 - protein, 16 aa, Homo sapiens
  ( 82 )...( 97 ): >TEA2_HUMAN
LIARYIKLRTGKTRTR

SEQ ID NO: 28969 - protein, 16 aa, Homo sapiens
  ( 86 )...( 101 ): >TEA2_HUMAN
YIKLRTGKTRTRKQVS

SEQ ID NO: 28970 - protein, 16 aa, Homo sapiens
  ( 87 )...( 102 ): >TEA2_HUMAN
IKLRTGKTRTRKQVSS

SEQ ID NO: 28971 - protein, 16 aa, Homo sapiens
  ( 88 )...( 103 ): >TEA2_HUMAN
KLRTGKTRTRKQVSSH

SEQ ID NO: 28972 - protein, 16 aa, Homo sapiens
  ( 89 )...( 104 ): >TEA2_HUMAN
LRTGKTRTRKQVSSHI

SEQ ID NO: 28973 - protein, 16 aa, Homo sapiens
  ( 90 )...( 105 ): >TEA2_HUMAN
RTGKTRTRKQVSSHIQ

SEQ ID NO: 28974 - protein, 16 aa, Homo sapiens
  ( 91 )...( 106 ): >TEA2_HUMAN
TGKTRTRKQVSSHIQV

SEQ ID NO: 28975 - protein, 16 aa, Homo sapiens
  ( 92 )...( 107 ): >TEA2_HUMAN
GKTRTRKQVSSHIQVL

SEQ ID NO: 28976 - protein, 16 aa, Homo sapiens
  ( 93 )...( 108 ): >TEA2_HUMAN
KTRTRKQVSSHIQVLA

SEQ ID NO: 28977 - protein, 16 aa, Homo sapiens
  ( 94 )...( 109 ): >TEA2_HUMAN
TRTRKQVSSHIQVLAR

SEQ ID NO: 28978 - protein, 16 aa, Homo sapiens
  ( 95 )...( 110 ): >TEA2_HUMAN
RTRKQVSSHIQVLARR

SEQ ID NO: 28979 - protein, 16 aa, Homo sapiens
  ( 96 )...( 111 ): >TEA2_HUMAN
TRKQVSSHIQVLARRK

SEQ ID NO: 28980 - protein, 16 aa, Homo sapiens
  ( 97 )...( 112 ): >TEA2_HUMAN
RKQVSSHIQVLARRKS

SEQ ID NO: 28981 - protein, 16 aa, Homo sapiens
  ( 98 )...( 113 ): >TEA2_HUMAN
KQVSSHIQVLARRKSR

SEQ ID NO: 28982 - protein, 16 aa, Homo sapiens
  ( 99 )...( 114 ): >TEA2_HUMAN
QVSSHIQVLARRKSRE

SEQ ID NO: 28983 - protein, 16 aa, Homo sapiens
  ( 100 )...( 115 ): >TEA2_HUMAN
VSSHIQVLARRKSREI

SEQ ID NO: 28984 - protein, 16 aa, Homo sapiens
  ( 101 )...( 116 ): >TEA2_HUMAN
SSHIQVLARRKSREIQ

SEQ ID NO: 28985 - protein, 16 aa, Homo sapiens
  ( 102 )...( 117 ): >TEA2_HUMAN
SHIQVLARRKSREIQS

SEQ ID NO: 28986 - protein, 16 aa, Homo sapiens
  ( 104 )...( 119 ): >TEA2_HUMAN
IQVLARRKSREIQSKL

SEQ ID NO: 28987 - protein, 16 aa, Homo sapiens
  ( 105 )...( 120 ): >TEA2_HUMAN
QVLARRKSREIQSKLK

SEQ ID NO: 28988 - protein, 16 aa, Homo sapiens
  ( 170 )...( 185 ): >TEF_HUMAN
DLKPQPMIKKAKKVFV

SEQ ID NO: 28989 - protein, 16 aa, Homo sapiens
  ( 171 )...( 186 ): >TEF_HUMAN
LKPQPMIKKAKKVFVP

SEQ ID NO: 28990 - protein, 16 aa, Homo sapiens
  ( 172 )...( 187 ): >TEF_HUMAN
KPQPMIKKAKKVFVPD

SEQ ID NO: 28991 - protein, 16 aa, Homo sapiens
  ( 211 )...( 226 ): >TEF_HUMAN
ARRLKENQITIRAAFL

SEQ ID NO: 28992 - protein, 16 aa, Homo sapiens
  ( 38 )...( 53 ): >TEL2_HUMAN
GGICKLPGRLRIQPAL

SEQ ID NO: 28993 - protein, 16 aa, Homo sapiens
  ( 39 )...( 54 ): >TEL2_HUMAN
GICKLPGRLRIQPALW

SEQ ID NO: 28994 - protein, 16 aa, Homo sapiens
  ( 41 )...( 56 ): >TEL2_HUMAN
CKLPGRLRIQPALWSR

SEQ ID NO: 28995 - protein, 16 aa, Homo sapiens
  ( 109 )...( 124 ): >TEL2_HUMAN
LLQYIKTQRRALVCGP

SEQ ID NO: 28996 - protein, 16 aa, Homo sapiens
  ( 110 )...( 125 ): >TEL2_HUMAN
LQYIKTQRRALVCGPF

SEQ ID NO: 28997 - protein, 16 aa, Homo sapiens
  ( 111 )...( 126 ): >TEL2_HUMAN
QYIKTQRRALVCGPFF

SEQ ID NO: 28998 - protein, 16 aa, Homo sapiens
  ( 260 )...( 275 ): >TEL2_HUMAN
GLARLWGNHKNRVNMT

SEQ ID NO: 28999 - protein, 16 aa, Homo sapiens
  ( 286 )...( 301 ): >TEL2_HUMAN
YYKLNIIKKEPGQKLL

SEQ ID NO: 29000 - protein, 16 aa, Homo sapiens
  ( 287 )...( 302 ): >TEL2_HUMAN
YKLNIIKKEPGQKLLF

SEQ ID NO: 29001 - protein, 16 aa, Homo sapiens
  ( 288 )...( 303 ): >TEL2_HUMAN
KLNIIKKEPGQKLLFR

SEQ ID NO: 29002 - protein, 16 aa, Homo sapiens
  ( 291 )...( 306 ): >TEL2_HUMAN
IIKKEPGQKLLFRFLK

SEQ ID NO: 29003 - protein, 16 aa, Homo sapiens
  ( 292 )...( 307 ): >TEL2_HUMAN
IKKEPGQKLLFRFLKT

SEQ ID NO: 29004 - protein, 16 aa, Homo sapiens
  ( 294 )...( 309 ): >TEL2_HUMAN
KEPGQKLLFRFLKTPG

SEQ ID NO: 29005 - protein, 16 aa, Homo sapiens
  ( 295 )...( 310 ): >TEL2_HUMAN
EPGQKLLFRFLKTPGK

SEQ ID NO: 29006 - protein, 16 aa, Homo sapiens
  ( 296 )...( 311 ): >TEL2_HUMAN
PGQKLLFRFLKTPGKM

SEQ ID NO: 29007 - protein, 16 aa, Homo sapiens
  ( 297 )...( 312 ): >TEL2_HUMAN
GQKLLFRFLKTPGKMV

SEQ ID NO: 29008 - protein, 16 aa, Homo sapiens
  ( 298 )...( 313 ): >TEL2_HUMAN
QKLLFRFLKTPGKMVQ

SEQ ID NO: 29009 - protein, 16 aa, Homo sapiens
  ( 299 )...( 314 ): >TEL2_HUMAN
KLLFRFLKTPGKMVQD

SEQ ID NO: 29010 - protein, 16 aa, Homo sapiens
  ( 300 )...( 315 ): >TEL2_HUMAN
LLFRFLKTPGKMVQDK

SEQ ID NO: 29011 - protein, 16 aa, Homo sapiens
  ( 65 )...( 80 ): >TF15_HUMAN
AGPVVVVRQRQAANAR

SEQ ID NO: 29012 - protein, 16 aa, Homo sapiens
  ( 67 )...( 82 ): >TF15_HUMAN
PVVVVRQRQAANARER

SEQ ID NO: 29013 - protein, 16 aa, Homo sapiens
  ( 106 )...( 121 ): >TF15_HUMAN
RKLSKIETLRLASSYI

SEQ ID NO: 29014 - protein, 16 aa, Homo sapiens
  ( 172 )...( 187 ): >TF15_HUMAN
QRKGGGRRDLGGSCLK

SEQ ID NO: 29015 - protein, 16 aa, Homo sapiens
  ( 184 )...( 199 ): >TF15_HUMAN
SCLKVRGVAPLRGPRR

SEQ ID NO: 29016 - protein, 15 aa, Homo sapiens
  ( 185 )...( 200 ): >TF15_HUMAN
CLKVRGVAPLRGPRR

SEQ ID NO: 29017 - protein, 14 aa, Homo sapiens
  ( 186 )...( 201 ): >TF15_HUMAN
LKVRGVAPLRGPRR

SEQ ID NO: 29018 - protein, 16 aa, Homo sapiens
  ( 247 )...( 262 ): >TF1B_HUMAN
DAVRNQRKLLASLVKR

SEQ ID NO: 29019 - protein, 16 aa, Homo sapiens
  ( 248 )...( 263 ): >TF1B_HUMAN
AVRNQRKLLASLVKRL

SEQ ID NO: 29020 - protein, 16 aa, Homo sapiens
  ( 249 )...( 264 ): >TF1B_HUMAN
VRNQRKLLASLVKRLG

SEQ ID NO: 29021 - protein, 16 aa, Homo sapiens
  ( 250 )...( 265 ): >TF1B_HUMAN
RNQRKLLASLVKRLGD

SEQ ID NO: 29022 - protein, 16 aa, Homo sapiens
  ( 251 )...( 266 ): >TF1B_HUMAN
NQRKLLASLVKRLGDK

SEQ ID NO: 29023 - protein, 16 aa, Homo sapiens
  ( 252 )...( 267 ): >TF1B_HUMAN
QRKLLASLVKRLGDKH

SEQ ID NO: 29024 - protein, 16 aa, Homo sapiens
  ( 253 )...( 268 ): >TF1B_HUMAN
RKLLASLVKRLGDKHA

SEQ ID NO: 29025 - protein, 16 aa, Homo sapiens
  ( 260 )...( 275 ): >TF1B_HUMAN
VKRLGDKHATLQKSTK

SEQ ID NO: 29026 - protein, 16 aa, Homo sapiens
  ( 275 )...( 290 ): >TF1B_HUMAN
KEVRSSIRQVSDVQKR

SEQ ID NO: 29027 - protein, 16 aa, Homo sapiens
  ( 277 )...( 292 ): >TF1B_HUMAN
VRSSIRQVSDVQKRVQ

SEQ ID NO: 29028 - protein, 16 aa, Homo sapiens
  ( 278 )...( 293 ): >TF1B_HUMAN
RSSIRQVSDVQKRVQV

SEQ ID NO: 29029 - protein, 16 aa, Homo sapiens
  ( 289 )...( 304 ): >TF1B_HUMAN
KRVQVDVKMAILQIMK

SEQ ID NO: 29030 - protein, 16 aa, Homo sapiens
  ( 295 )...( 310 ): >TF1B_HUMAN
VKMAILQIMKELNKRG

SEQ ID NO: 29031 - protein, 16 aa, Homo sapiens
  ( 296 )...( 311 ): >TF1B_HUMAN
KMAILQIMKELNKRGR

SEQ ID NO: 29032 - protein, 16 aa, Homo sapiens
  ( 297 )...( 312 ): >TF1B_HUMAN
MAILQIMKELNKRGRV

SEQ ID NO: 29033 - protein, 16 aa, Homo sapiens
  ( 298 )...( 313 ): >TF1B_HUMAN
AILQIMKELNKRGRVL

SEQ ID NO: 29034 - protein, 16 aa, Homo sapiens
  ( 299 )...( 314 ): >TF1B_HUMAN
ILQIMKELNKRGRVLV

SEQ ID NO: 29035 - protein, 16 aa, Homo sapiens
  ( 300 )...( 315 ): >TF1B_HUMAN
LQIMKELNKRGRVLVN

SEQ ID NO: 29036 - protein, 16 aa, Homo sapiens
  ( 304 )...( 319 ): >TF1B_HUMAN
KELNKRGRVLVNDAQK

SEQ ID NO: 29037 - protein, 16 aa, Homo sapiens
  ( 306 )...( 321 ): >TF1B_HUMAN
LNKRGRVLVNDAQKVT

SEQ ID NO: 29038 - protein, 16 aa, Homo sapiens
  ( 360 )...( 375 ): >TF1B_HUMAN
ALLLSKKLIYFQLHRA

SEQ ID NO: 29039 - protein, 16 aa, Homo sapiens
  ( 469 )...( 484 ): >TF1B_HUMAN
KRSRSGEGEVSGLMRK

SEQ ID NO: 29040 - protein, 16 aa, Homo sapiens
  ( 478 )...( 493 ): >TF1B_HUMAN
VSGLMRKVPRVSLERL

SEQ ID NO: 29041 - protein, 16 aa, Homo sapiens
  ( 692 )...( 707 ): >TF1B_HUMAN
VVAKLSPANQRKCERV

SEQ ID NO: 29042 - protein, 16 aa, Homo sapiens
  ( 693 )...( 708 ): >TF1B_HUMAN
VAKLSPANQRKCERVL

SEQ ID NO: 29043 - protein, 16 aa, Homo sapiens
  ( 694 )...( 709 ): >TF1B_HUMAN
AKLSPANQRKCERVLL

SEQ ID NO: 29044 - protein, 16 aa, Homo sapiens
  ( 695 )...( 710 ): >TF1B_HUMAN
KLSPANQRKCERVLLA

SEQ ID NO: 29045 - protein, 16 aa, Homo sapiens
  ( 45 )...( 60 ): >TF21_HUMAN
ENGSPQKGRGGLGKRR

SEQ ID NO: 29046 - protein, 16 aa, Homo sapiens
  ( 46 )...( 61 ): >TF21_HUMAN
NGSPQKGRGGLGKRRK

SEQ ID NO: 29047 - protein, 16 aa, Homo sapiens
  ( 48 )...( 63 ): >TF21_HUMAN
SPQKGRGGLGKRRKAP

SEQ ID NO: 29048 - protein, 16 aa, Homo sapiens
  ( 49 )...( 64 ): >TF21_HUMAN
PQKGRGGLGKRRKAPT

SEQ ID NO: 29049 - protein, 16 aa, Homo sapiens
  ( 54 )...( 69 ): >TF21_HUMAN
GGLGKRRKAPTKKSPL

SEQ ID NO: 29050 - protein, 16 aa, Homo sapiens
  ( 55 )...( 70 ): >TF21_HUMAN
GLGKRRKAPTKKSPLS

SEQ ID NO: 29051 - protein, 16 aa, Homo sapiens
  ( 56 )...( 71 ): >TF21_HUMAN
LGKRRKAPTKKSPLSG

SEQ ID NO: 29052 - protein, 16 aa, Homo sapiens
  ( 57 )...( 72 ): >TF21_HUMAN
GKRRKAPTKKSPLSGV

SEQ ID NO: 29053 - protein, 16 aa, Homo sapiens
  ( 58 )...( 73 ): >TF21_HUMAN
KRRKAPTKKSPLSGVS

SEQ ID NO: 29054 - protein, 16 aa, Homo sapiens
  ( 59 )...( 74 ): >TF21_HUMAN
RRKAPTKKSPLSGVSQ

SEQ ID NO: 29055 - protein, 16 aa, Homo sapiens
  ( 76 )...( 91 ): >TF21_HUMAN
GKQVQRNAANARERAR

SEQ ID NO: 29056 - protein, 16 aa, Homo sapiens
  ( 82 )...( 97 ): >TF21_HUMAN
NAANARERARMRVLSK

SEQ ID NO: 29057 - protein, 16 aa, Homo sapiens
  ( 83 )...( 98 ): >TF21_HUMAN
AANARERARMRVLSKA

SEQ ID NO: 29058 - protein, 16 aa, Homo sapiens
  ( 89 )...( 104 ): >TF21_HUMAN
RARMRVLSKAFSRLKT

SEQ ID NO: 29059 - protein, 16 aa, Homo sapiens
  ( 90 )...( 105 ): >TF21_HUMAN
ARMRVLSKAFSRLKTT

SEQ ID NO: 29060 - protein, 16 aa, Homo sapiens
  ( 91 )...( 106 ): >TF21_HUMAN
RMRVLSKAFSRLKTTL

SEQ ID NO: 29061 - protein, 16 aa, Homo sapiens
  ( 92 )...( 107 ): >TF21_HUMAN
MRVLSKAFSRLKTTLP

SEQ ID NO: 29062 - protein, 16 aa, Homo sapiens
  ( 93 )...( 108 ): >TF21_HUMAN
RVLSKAFSRLKTTLPW

SEQ ID NO: 29063 - protein, 16 aa, Homo sapiens
  ( 94 )...( 109 ): >TF21_HUMAN
VLSKAFSRLKTTLPWV

SEQ ID NO: 29064 - protein, 16 aa, Homo sapiens
  ( 236 )...( 251 ): >TF3A_HUMAN
KLKRHAKAHEGYVCQK

SEQ ID NO: 29065 - protein, 16 aa, Homo sapiens
  ( 356 )...( 371 ): >TF3A_HUMAN
AVVHDPDKKKMKLKVK

SEQ ID NO: 29066 - protein, 16 aa, Homo sapiens
  ( 366 )...( 381 ): >TF3A_HUMAN
MKLKVKKSREKRSLAS

SEQ ID NO: 29067 - protein, 16 aa, Homo sapiens
  ( 368 )...( 383 ): >TF3A_HUMAN
LKVKKSREKRSLASHL

SEQ ID NO: 29068 - protein, 16 aa, Homo sapiens
  ( 369 )...( 384 ): >TF3A_HUMAN
KVKKSREKRSLASHLS

SEQ ID NO: 29069 - protein, 16 aa, Homo sapiens
  ( 370 )...( 385 ): >TF3A_HUMAN
VKKSREKRSLASHLSG

SEQ ID NO: 29070 - protein, 16 aa, Homo sapiens
  ( 371 )...( 386 ): >TF3A_HUMAN
KKSREKRSLASHLSGY

SEQ ID NO: 29071 - protein, 16 aa, Homo sapiens
  ( 382 )...( 397 ): >TF3A_HUMAN
HLSGYIPPKRKQGQGL

SEQ ID NO: 29072 - protein, 16 aa, Homo sapiens
  ( 136 )...( 151 ): >TFAM_HUMAN
KHLKRKAMTKKKELTL

SEQ ID NO: 29073 - protein, 16 aa, Homo sapiens
  ( 137 )...( 152 ): >TFAM_HUMAN
HLKRKAMTKKKELTLL

SEQ ID NO: 29074 - protein, 16 aa, Homo sapiens
  ( 138 )...( 153 ): >TFAM_HUMAN
LKRKAMTKKKELTLLG

SEQ ID NO: 29075 - protein, 16 aa, Homo sapiens
  ( 139 )...( 154 ): >TFAM_HUMAN
KRKAMTKKKELTLLGK

SEQ ID NO: 29076 - protein, 16 aa, Homo sapiens
  ( 140 )...( 155 ): >TFAM_HUMAN
RKAMTKKKELTLLGKP

SEQ ID NO: 29077 - protein, 16 aa, Homo sapiens
  ( 141 )...( 156 ): >TFAM_HUMAN
KAMTKKKELTLLGKPK

SEQ ID NO: 29078 - protein, 16 aa, Homo sapiens
  ( 142 )...( 157 ): >TFAM_HUMAN
AMTKKKELTLLGKPKR

SEQ ID NO: 29079 - protein, 16 aa, Homo sapiens
  ( 143 )...( 158 ): >TFAM_HUMAN
MTKKKELTLLGKPKRP

SEQ ID NO: 29080 - protein, 16 aa, Homo sapiens
  ( 144 )...( 159 ): >TFAM_HUMAN
TKKKELTLLGKPKRPR

SEQ ID NO: 29081 - protein, 16 aa, Homo sapiens
  ( 145 )...( 160 ): >TFAM_HUMAN
KKKELTLLGKPKRPRS

SEQ ID NO: 29082 - protein, 16 aa, Homo sapiens
  ( 146 )...( 161 ): >TFAM_HUMAN
KKELTLLGKPKRPRSA

SEQ ID NO: 29083 - protein, 16 aa, Homo sapiens
  ( 147 )...( 162 ): >TFAM_HUMAN
KELTLLGKPKRPRSAY

SEQ ID NO: 29084 - protein, 16 aa, Homo sapiens
  ( 148 )...( 163 ): >TFAM_HUMAN
ELTLLGKPKRPRSAYN

SEQ ID NO: 29085 - protein, 16 aa, Homo sapiens
  ( 149 )...( 164 ): >TFAM_HUMAN
LTLLGKPKRPRSAYNV

SEQ ID NO: 29086 - protein, 16 aa, Homo sapiens
  ( 150 )...( 165 ): >TFAM_HUMAN
TLLGKPKRPRSAYNVY

SEQ ID NO: 29087 - protein, 16 aa, Homo sapiens
  ( 151 )...( 166 ): >TFAM_HUMAN
LLGKPKRPRSAYNVYV

SEQ ID NO: 29088 - protein, 16 aa, Homo sapiens
  ( 221 )...( 236 ): >TFAM_HUMAN
QMIEVGRKDLLRRTIK

SEQ ID NO: 29089 - protein, 16 aa, Homo sapiens
  ( 222 )...( 237 ): >TFAM_HUMAN
MIEVGRKDLLRRTIKK

SEQ ID NO: 29090 - protein, 16 aa, Homo sapiens
  ( 223 )...( 238 ): >TFAM_HUMAN
IEVGRKDLLRRTIKKQ

SEQ ID NO: 29091 - protein, 14 aa, Homo sapiens
  ( 233 )...( 248 ): >TFAM_HUMAN
RTIKKQRKYGAEEC

SEQ ID NO: 29092 - protein, 16 aa, Homo sapiens
  ( 157 )...( 172 ): >TFE2_HUMAN
SRRRAADGSLDTQPKK

SEQ ID NO: 29093 - protein, 16 aa, Homo sapiens
  ( 158 )...( 173 ): >TFE2_HUMAN
RRRAADGSLDTQPKKV

SEQ ID NO: 29094 - protein, 16 aa, Homo sapiens
  ( 159 )...( 174 ): >TFE2_HUMAN
RRAADGSLDTQPKKVR

SEQ ID NO: 29095 - protein, 16 aa, Homo sapiens
  ( 160 )...( 175 ): >TFE2_HUMAN
RAADGSLDTQPKKVRK

SEQ ID NO: 29096 - protein, 16 aa, Homo sapiens
  ( 165 )...( 180 ): >TFE2_HUMAN
SLDTQPKKVRKVPPGL

SEQ ID NO: 29097 - protein, 16 aa, Homo sapiens
  ( 166 )...( 181 ): >TFE2_HUMAN
LDTQPKKVRKVPPGLP

SEQ ID NO: 29098 - protein, 16 aa, Homo sapiens
  ( 604 )...( 619 ): >TFE2_HUMAN
QQVRERNLNPKAACLK

SEQ ID NO: 29099 - protein, 16 aa, Homo sapiens
  ( 107 )...( 122 ): >TFE3_HUMAN
SSSSSSRVLLRQQLMR

SEQ ID NO: 29100 - protein, 16 aa, Homo sapiens
  ( 108 )...( 123 ): >TFE3_HUMAN
SSSSSRVLLRQQLMRA

SEQ ID NO: 29101 - protein, 16 aa, Homo sapiens
  ( 109 )...( 124 ): >TFE3_HUMAN
SSSSRVLLRQQLMRAQ

SEQ ID NO: 29102 - protein, 16 aa, Homo sapiens
  ( 110 )...( 125 ): >TFE3_HUMAN
SSSRVLLRQQLMRAQA

SEQ ID NO: 29103 - protein, 16 aa, Homo sapiens
  ( 111 )...( 126 ): >TFE3_HUMAN
SSRVLLRQQLMRAQAQ

SEQ ID NO: 29104 - protein, 16 aa, Homo sapiens
  ( 191 )...( 206 ): >TFE3_HUMAN
LQQARRQQVKQYLSTT

SEQ ID NO: 29105 - protein, 16 aa, Homo sapiens
  ( 192 )...( 207 ): >TFE3_HUMAN
QQARRQQVKQYLSTTL

SEQ ID NO: 29106 - protein, 16 aa, Homo sapiens
  ( 193 )...( 208 ): >TFE3_HUMAN
QARRQQVKQYLSTTLG

SEQ ID NO: 29107 - protein, 16 aa, Homo sapiens
  ( 194 )...( 209 ): >TFE3_HUMAN
ARRQQVKQYLSTTLGP

SEQ ID NO: 29108 - protein, 16 aa, Homo sapiens
  ( 195 )...( 210 ): >TFE3_HUMAN
RRQQVKQYLSTTLGPK

SEQ ID NO: 29109 - protein, 16 aa, Homo sapiens
  ( 196 )...( 211 ): >TFE3_HUMAN
RQQVKQYLSTTLGPKL

SEQ ID NO: 29110 - protein, 16 aa, Homo sapiens
  ( 382 )...( 397 ): >TFE3_HUMAN
RWNKGTILKASVDYIR

SEQ ID NO: 29111 - protein, 16 aa, Homo sapiens
  ( 383 )...( 398 ): >TFE3_HUMAN
WNKGTILKASVDYIRK

SEQ ID NO: 29112 - protein, 16 aa, Homo sapiens
  ( 384 )...( 399 ): >TFE3_HUMAN
NKGTILKASVDYIRKL

SEQ ID NO: 29113 - protein, 16 aa, Homo sapiens
  ( 385 )...( 400 ): >TFE3_HUMAN
KGTILKASVDYIRKLQ

SEQ ID NO: 29114 - protein, 16 aa, Homo sapiens
  ( 386 )...( 401 ): >TFE3_HUMAN
GTILKASVDYIRKLQK

SEQ ID NO: 29115 - protein, 16 aa, Homo sapiens
  ( 584 )...( 599 ): >TFE3_HUMAN
TFPPRKGGPVRMRPRL

SEQ ID NO: 29116 - protein, 16 aa, Homo sapiens
  ( 603 )...( 618 ): >TFE3_HUMAN
PPMRLPRYLGRGDVIR

SEQ ID NO: 29117 - protein, 16 aa, Homo sapiens
  ( 604 )...( 619 ): >TFE3_HUMAN
PMRLPRYLGRGDVIRP

SEQ ID NO: 29118 - protein, 16 aa, Homo sapiens
  ( 271 )...( 286 ): >TFEB_HUMAN
RWNKGTILKASVDYIR

SEQ ID NO: 29119 - protein, 16 aa, Homo sapiens
  ( 272 )...( 287 ): >TFEB_HUMAN
WNKGTILKASVDYIRR

SEQ ID NO: 29120 - protein, 16 aa, Homo sapiens
  ( 273 )...( 288 ): >TFEB_HUMAN
NKGTILKASVDYIRRM

SEQ ID NO: 29121 - protein, 16 aa, Homo sapiens
  ( 274 )...( 289 ): >TFEB_HUMAN
KGTILKASVDYIRRMQ

SEQ ID NO: 29122 - protein, 16 aa, Homo sapiens
  ( 275 )...( 290 ): >TFEB_HUMAN
GTILKASVDYIRRMQK

SEQ ID NO: 29123 - protein, 16 aa, Homo sapiens
  ( 5 )...( 20 ): >TFH1_HUMAN
SEEVLLIVKKVRQKKQ

SEQ ID NO: 29124 - protein, 16 aa, Homo sapiens
  ( 7 )...( 22 ): >TFH1_HUMAN
EVLLIVKKVRQKKQDG

SEQ ID NO: 29125 - protein, 16 aa, Homo sapiens
  ( 8 )...( 23 ): >TFH1_HUMAN
VLLIVKKVRQKKQDGA

SEQ ID NO: 29126 - protein, 16 aa, Homo sapiens
  ( 9 )...( 24 ): >TFH1_HUMAN
LLIVKKVRQKKQDGAL

SEQ ID NO: 29127 - protein, 16 aa, Homo sapiens
  ( 10 )...( 25 ): >TFH1_HUMAN
LIVKKVRQKKQDGALY

SEQ ID NO: 29128 - protein, 16 aa, Homo sapiens
  ( 11 )...( 26 ): >TFH1_HUMAN
IVKKVRQKKQDGALYL

SEQ ID NO: 29129 - protein, 16 aa, Homo sapiens
  ( 12 )...( 27 ): >TFH1_HUMAN
VKKVRQKKQDGALYLM

SEQ ID NO: 29130 - protein, 16 aa, Homo sapiens
  ( 13 )...( 28 ): >TFH1_HUMAN
KKVRQKKQDGALYLMA

SEQ ID NO: 29131 - protein, 16 aa, Homo sapiens
  ( 363 )...( 378 ): >TFH1_HUMAN
LGKNNSVKTIALNLKK

SEQ ID NO: 29132 - protein, 16 aa, Homo sapiens
  ( 364 )...( 379 ): >TFH1_HUMAN
GKNNSVKTIALNLKKS

SEQ ID NO: 29133 - protein, 16 aa, Homo sapiens
  ( 489 )...( 504 ): >TFH1_HUMAN
KVVKMKSNLERFQVTK

SEQ ID NO: 29134 - protein, 16 aa, Homo sapiens
  ( 490 )...( 505 ): >TFH1_HUMAN
VVKMKSNLERFQVTKL

SEQ ID NO: 29135 - protein, 16 aa, Homo sapiens
  ( 491 )...( 506 ): >TFH1_HUMAN
VKMKSNLERFQVTKLC

SEQ ID NO: 29136 - protein, 16 aa, Homo sapiens
  ( 492 )...( 507 ): >TFH1_HUMAN
KMKSNLERFQVTKLCP

SEQ ID NO: 29137 - protein, 16 aa, Homo sapiens
  ( 30 )...( 45 ): >TFH2_HUMAN
LKATIEDILFKAKRKR

SEQ ID NO: 29138 - protein, 16 aa, Homo sapiens
  ( 31 )...( 46 ): >TFH2_HUMAN
KATIEDILFKAKRKRV

SEQ ID NO: 29139 - protein, 16 aa, Homo sapiens
  ( 32 )...( 47 ): >TFH2_HUMAN
ATIEDILFKAKRKRVF

SEQ ID NO: 29140 - protein, 16 aa, Homo sapiens
  ( 41 )...( 56 ): >TFH2_HUMAN
AKRKRVFEHHGQVRLG

SEQ ID NO: 29141 - protein, 16 aa, Homo sapiens
  ( 43 )...( 58 ): >TFH2_HUMAN
RKRVFEHHGQVRLGMM

SEQ ID NO: 29142 - protein, 16 aa, Homo sapiens
  ( 44 )...( 59 ): >TFH2_HUMAN
KRVFEHHGQVRLGMMR

SEQ ID NO: 29143 - protein, 16 aa, Homo sapiens
  ( 98 )...( 113 ): >TFH2_HUMAN
QNPISQIGIIVTKSKR

SEQ ID NO: 29144 - protein, 16 aa, Homo sapiens
  ( 99 )...( 114 ): >TFH2_HUMAN
NPISQIGIIVTKSKRA

SEQ ID NO: 29145 - protein, 16 aa, Homo sapiens
  ( 110 )...( 125 ): >TFH2_HUMAN
KSKRAEKLTELSGNPR

SEQ ID NO: 29146 - protein, 16 aa, Homo sapiens
  ( 111 )...( 126 ): >TFH2_HUMAN
SKRAEKLTELSGNPRK

SEQ ID NO: 29147 - protein, 16 aa, Homo sapiens
  ( 120 )...( 135 ): >TFH2_HUMAN
LSGNPRKHITSLKKAV

SEQ ID NO: 29148 - protein, 16 aa, Homo sapiens
  ( 180 )...( 195 ): >TFH2_HUMAN
SNIYDLIKTLKAAKIR

SEQ ID NO: 29149 - protein, 16 aa, Homo sapiens
  ( 181 )...( 196 ): >TFH2_HUMAN
NIYDLIKTLKAAKIRV

SEQ ID NO: 29150 - protein, 16 aa, Homo sapiens
  ( 182 )...( 197 ): >TFH2_HUMAN
IYDLIKTLKAAKIRVS

SEQ ID NO: 29151 - protein, 16 aa, Homo sapiens
  ( 183 )...( 198 ): >TFH2_HUMAN
YDLIKTLKAAKIRVSV

SEQ ID NO: 29152 - protein, 16 aa, Homo sapiens
  ( 184 )...( 199 ): >TFH2_HUMAN
DLIKTLKAAKIRVSVI

SEQ ID NO: 29153 - protein, 16 aa, Homo sapiens
  ( 137 )...( 152 ): >TFH3_HUMAN
LAKALCYIHRMNKEVK

SEQ ID NO: 29154 - protein, 16 aa, Homo sapiens
  ( 287 )...( 302 ): >TFH3_HUMAN
TAFKISLPPVLKAKKR

SEQ ID NO: 29155 - protein, 16 aa, Homo sapiens
  ( 288 )...( 303 ): >TFH3_HUMAN
AFKISLPPVLKAKKRN

SEQ ID NO: 29156 - protein, 15 aa, Homo sapiens
  ( 289 )...( 304 ): >TFH3_HUMAN
FKISLPPVLKAKKRN

SEQ ID NO: 29157 - protein, 14 aa, Homo sapiens
  ( 290 )...( 305 ): >TFH3_HUMAN
KISLPPVLKAKKRN

SEQ ID NO: 29158 - protein, 16 aa, Homo sapiens
  ( 4 )...( 19 ): >TFH4_HUMAN
TPSRGLNRVHLQCRNL

SEQ ID NO: 29159 - protein, 16 aa, Homo sapiens
  ( 112 )...( 127 ): >TFH4_HUMAN
PIFRQNLRIALLGGGK

SEQ ID NO: 29160 - protein, 16 aa, Homo sapiens
  ( 113 )...( 128 ): >TFH4_HUMAN
IFRQNLRIALLGGGKA

SEQ ID NO: 29161 - protein, 16 aa, Homo sapiens
  ( 114 )...( 129 ): >TFH4_HUMAN
FRQNLRIALLGGGKAW

SEQ ID NO: 29162 - protein, 16 aa, Homo sapiens
  ( 115 )...( 130 ): >TFH4_HUMAN
RQNLRIALLGGGKAWS

SEQ ID NO: 29163 - protein, 16 aa, Homo sapiens
  ( 279 )...( 294 ): >TFH4_HUMAN
RRYYPTRLAINLSSGV

SEQ ID NO: 29164 - protein, 16 aa, Homo sapiens
  ( 363 )...( 378 ): >TFH4_HUMAN
QIIHFLRTRAHPVMLK

SEQ ID NO: 29165 - protein, 16 aa, Homo sapiens
  ( 364 )...( 379 ): >TFH4_HUMAN
IIHFLRTRAHPVMLKQ

SEQ ID NO: 29166 - protein, 16 aa, Homo sapiens
  ( 367 )...( 382 ): >TFH4_HUMAN
FLRTRAHPVMLKQTPV

SEQ ID NO: 29167 - protein, 16 aa, Homo sapiens
  ( 368 )...( 383 ): >TFH4_HUMAN
LRTRAHPVMLKQTPVL

SEQ ID NO: 29168 - protein, 16 aa, Homo sapiens
  ( 369 )...( 384 ): >TFH4_HUMAN
RTRAHPVMLKQTPVLP

SEQ ID NO: 29169 - protein, 16 aa, Homo sapiens
  ( 438 )...( 453 ): >TFH4_HUMAN
KRLMVVTPAGHSDVKR

SEQ ID NO: 29170 - protein, 16 aa, Homo sapiens
  ( 442 )...( 457 ): >TFH4_HUMAN
VVTPAGHSDVKRFWKR

SEQ ID NO: 29171 - protein, 16 aa, Homo sapiens
  ( 124 )...( 139 ): >TRLT_HUMAN
WGRRARRGVEVAAGAS

SEQ ID NO: 29172 - protein, 16 aa, Homo sapiens
  ( 176 )...( 191 ): >TRLT_HUMAN
GLLGILVCNLLKRKGY

SEQ ID NO: 29173 - protein, 16 aa, Homo sapiens
  ( 177 )...( 192 ): >TRLT_HUMAN
LLGILVCNLLKRKGYH

SEQ ID NO: 29174 - protein, 16 aa, Homo sapiens
  ( 344 )...( 359 ): >TRLT_HUMAN
ILSVGRFRVARIPEQR

SEQ ID NO: 29175 - protein, 16 aa, Homo sapiens
  ( 345 )...( 360 ): >TRLT_HUMAN
LSVGRFRVARIPEQRT

SEQ ID NO: 29176 - protein, 16 aa, Homo sapiens
  ( 346 )...( 361 ): >TRLT_HUMAN
SVGRFRVARIPEQRTS

SEQ ID NO: 29177 - protein, 16 aa, Homo sapiens
  ( 347 )...( 362 ): >TRLT_HUMAN
VGRFRVARIPEQRTSS

SEQ ID NO: 29178 - protein, 16 aa, Homo sapiens
  ( 348 )...( 363 ): >TRLT_HUMAN
GRFRVARIPEQRTSSM

SEQ ID NO: 29179 - protein, 16 aa, Homo sapiens
  ( 349 )...( 364 ): >TRLT_HUMAN
RFRVARIPEQRTSSMV

SEQ ID NO: 29180 - protein, 16 aa, Homo sapiens
  ( 392 )...( 407 ): >TRLT_HUMAN
QQALLGSGGSRTKWLK

SEQ ID NO: 29181 - protein, 16 aa, Homo sapiens
  ( 393 )...( 408 ): >TRLT_HUMAN
QALLGSGGSRTKWLKP

SEQ ID NO: 29182 - protein, 16 aa, Homo sapiens
  ( 33 )...( 48 ): >TRX2_HUMAN
RGGRGNGAERVRVALR

SEQ ID NO: 29183 - protein, 16 aa, Homo sapiens
  ( 34 )...( 49 ): >TRX2_HUMAN
GGRGNGAERVRVALRR

SEQ ID NO: 29184 - protein, 16 aa, Homo sapiens
  ( 35 )...( 50 ): >TRX2_HUMAN
GRGNGAERVRVALRRG

SEQ ID NO: 29185 - protein, 16 aa, Homo sapiens
  ( 36 )...( 51 ): >TRX2_HUMAN
RGNGAERVRVALRRGG

SEQ ID NO: 29186 - protein, 16 aa, Homo sapiens
  ( 64 )...( 79 ): >TRX2_HUMAN
DTALLRLLGLRRGLRR

SEQ ID NO: 29187 - protein, 16 aa, Homo sapiens
  ( 65 )...( 80 ): >TRX2_HUMAN
TALLRLLGLRRGLRRL

SEQ ID NO: 29188 - protein, 16 aa, Homo sapiens
  ( 132 )...( 147 ): >TRX2_HUMAN
VAPSSLRSALRSQRGR

SEQ ID NO: 29189 - protein, 16 aa, Homo sapiens
  ( 133 )...( 148 ): >TRX2_HUMAN
APSSLRSALRSQRGRA

SEQ ID NO: 29190 - protein, 16 aa, Homo sapiens
  ( 135 )...( 150 ): >TRX2_HUMAN
SSLRSALRSQRGRAPR

SEQ ID NO: 29191 - protein, 16 aa, Homo sapiens
  ( 136 )...( 151 ): >TRX2_HUMAN
SLRSALRSQRGRAPRG

SEQ ID NO: 29192 - protein, 16 aa, Homo sapiens
  ( 146 )...( 161 ): >TRX2_HUMAN
GRAPRGRGRKHKTTPL

SEQ ID NO: 29193 - protein, 16 aa, Homo sapiens
  ( 147 )...( 162 ): >TRX2_HUMAN
RAPRGRGRKHKTTPLP

SEQ ID NO: 29194 - protein, 16 aa, Homo sapiens
  ( 148 )...( 163 ): >TRX2_HUMAN
APRGRGRKHKTTPLPP

SEQ ID NO: 29195 - protein, 16 aa, Homo sapiens
  ( 149 )...( 164 ): >TRX2_HUMAN
PRGRGRKHKTTPLPPP

SEQ ID NO: 29196 - protein, 16 aa, Homo sapiens
  ( 151 )...( 166 ): >TRX2_HUMAN
GRGRKHKTTPLPPPRL

SEQ ID NO: 29197 - protein, 16 aa, Homo sapiens
  ( 152 )...( 167 ): >TRX2_HUMAN
RGRKHKTTPLPPPRLA

SEQ ID NO: 29198 - protein, 16 aa, Homo sapiens
  ( 194 )...( 209 ): >TRX2_HUMAN
TELLRRAQAPQAPRSR

SEQ ID NO: 29199 - protein, 16 aa, Homo sapiens
  ( 195 )...( 210 ): >TRX2_HUMAN
ELLRRAQAPQAPRSRA

SEQ ID NO: 29200 - protein, 16 aa, Homo sapiens
  ( 196 )...( 211 ): >TRX2_HUMAN
LLRRAQAPQAPRSRAC

SEQ ID NO: 29201 - protein, 16 aa, Homo sapiens
  ( 225 )...( 240 ): >TRX2_HUMAN
GRPAGPCRRKQQAVVV

SEQ ID NO: 29202 - protein, 16 aa, Homo sapiens
  ( 226 )...( 241 ): >TRX2_HUMAN
RPAGPCRRKQQAVVVA

SEQ ID NO: 29203 - protein, 16 aa, Homo sapiens
  ( 292 )...( 307 ): >TRX2_HUMAN
GRGRGRGGGLPFVIKF

SEQ ID NO: 29204 - protein, 16 aa, Homo sapiens
  ( 293 )...( 308 ): >TRX2_HUMAN
RGRGRGGGLPFVIKFV

SEQ ID NO: 29205 - protein, 16 aa, Homo sapiens
  ( 295 )...( 310 ): >TRX2_HUMAN
RGRGGGLPFVIKFVSR

SEQ ID NO: 29206 - protein, 16 aa, Homo sapiens
  ( 297 )...( 312 ): >TRX2_HUMAN
RGGGLPFVIKFVSRAK

SEQ ID NO: 29207 - protein, 16 aa, Homo sapiens
  ( 298 )...( 313 ): >TRX2_HUMAN
GGGLPFVIKFVSRAKK

SEQ ID NO: 29208 - protein, 16 aa, Homo sapiens
  ( 299 )...( 314 ): >TRX2_HUMAN
GGLPFVIKFVSRAKKV

SEQ ID NO: 29209 - protein, 16 aa, Homo sapiens
  ( 300 )...( 315 ): >TRX2_HUMAN
GLPFVIKFVSRAKKVK

SEQ ID NO: 29210 - protein, 16 aa, Homo sapiens
  ( 301 )...( 316 ): >TRX2_HUMAN
LPFVIKFVSRAKKVKM

SEQ ID NO: 29211 - protein, 16 aa, Homo sapiens
  ( 302 )...( 317 ): >TRX2_HUMAN
PFVIKFVSRAKKVKMG

SEQ ID NO: 29212 - protein, 16 aa, Homo sapiens
  ( 303 )...( 318 ): >TRX2_HUMAN
FVIKFVSRAKKVKMGQ

SEQ ID NO: 29213 - protein, 16 aa, Homo sapiens
  ( 304 )...( 319 ): >TRX2_HUMAN
VIKFVSRAKKVKMGQL

SEQ ID NO: 29214 - protein, 16 aa, Homo sapiens
  ( 305 )...( 320 ): >TRX2_HUMAN
IKFVSRAKKVKMGQLS

SEQ ID NO: 29215 - protein, 16 aa, Homo sapiens
  ( 306 )...( 321 ): >TRX2_HUMAN
KFVSRAKKVKMGQLSL

SEQ ID NO: 29216 - protein, 16 aa, Homo sapiens
  ( 307 )...( 322 ): >TRX2_HUMAN
FVSRAKKVKMGQLSLG

SEQ ID NO: 29217 - protein, 16 aa, Homo sapiens
  ( 308 )...( 323 ): >TRX2_HUMAN
VSRAKKVKMGQLSLGL

SEQ ID NO: 29218 - protein, 16 aa, Homo sapiens
  ( 309 )...( 324 ): >TRX2_HUMAN
SRAKKVKMGQLSLGLE

SEQ ID NO: 29219 - protein, 16 aa, Homo sapiens
  ( 310 )...( 325 ): >TRX2_HUMAN
RAKKVKMGQLSLGLES

SEQ ID NO: 29220 - protein, 16 aa, Homo sapiens
  ( 464 )...( 479 ): >TRX2_HUMAN
TCSRKRGRPPLTPSQR

SEQ ID NO: 29221 - protein, 16 aa, Homo sapiens
  ( 513 )...( 528 ): >TRX2_HUMAN
VAPKSTTFLKNIRQFI

SEQ ID NO: 29222 - protein, 16 aa, Homo sapiens
  ( 514 )...( 529 ): >TRX2_HUMAN
APKSTTFLKNIRQFIM

SEQ ID NO: 29223 - protein, 16 aa, Homo sapiens
  ( 516 )...( 531 ): >TRX2_HUMAN
KSTTFLKNIRQFIMPV

SEQ ID NO: 29224 - protein, 16 aa, Homo sapiens
  ( 520 )...( 535 ): >TRX2_HUMAN
FLKNIRQFIMPVVSAR

SEQ ID NO: 29225 - protein, 16 aa, Homo sapiens
  ( 521 )...( 536 ): >TRX2_HUMAN
LKNIRQFIMPVVSARS

SEQ ID NO: 29226 - protein, 16 aa, Homo sapiens
  ( 522 )...( 537 ): >TRX2_HUMAN
KNIRQFIMPVVSARSS

SEQ ID NO: 29227 - protein, 16 aa, Homo sapiens
  ( 523 )...( 538 ): >TRX2_HUMAN
NIRQFIMPVVSARSSR

SEQ ID NO: 29228 - protein, 16 aa, Homo sapiens
  ( 524 )...( 539 ): >TRX2_HUMAN
IRQFIMPVVSARSSRV

SEQ ID NO: 29229 - protein, 16 aa, Homo sapiens
  ( 525 )...( 540 ): >TRX2_HUMAN
RQFIMPVVSARSSRVI

SEQ ID NO: 29230 - protein, 16 aa, Homo sapiens
  ( 526 )...( 541 ): >TRX2_HUMAN
QFIMPVVSARSSRVIK

SEQ ID NO: 29231 - protein, 16 aa, Homo sapiens
  ( 527 )...( 542 ): >TRX2_HUMAN
FIMPVVSARSSRVIKT

SEQ ID NO: 29232 - protein, 16 aa, Homo sapiens
  ( 528 )...( 543 ): >TRX2_HUMAN
IMPVVSARSSRVIKTP

SEQ ID NO: 29233 - protein, 16 aa, Homo sapiens
  ( 529 )...( 544 ): >TRX2_HUMAN
MPVVSARSSRVIKTPR

SEQ ID NO: 29234 - protein, 16 aa, Homo sapiens
  ( 530 )...( 545 ): >TRX2_HUMAN
PVVSARSSRVIKTPRR

SEQ ID NO: 29235 - protein, 16 aa, Homo sapiens
  ( 531 )...( 546 ): >TRX2_HUMAN
VVSARSSRVIKTPRRF

SEQ ID NO: 29236 - protein, 16 aa, Homo sapiens
  ( 532 )...( 547 ): >TRX2_HUMAN
VSARSSRVIKTPRRFM

SEQ ID NO: 29237 - protein, 16 aa, Homo sapiens
  ( 590 )...( 605 ): >TRX2_HUMAN
PSTPVPLPEKRRSILR

SEQ ID NO: 29238 - protein, 16 aa, Homo sapiens
  ( 638 )...( 653 ): >TRX2_HUMAN
ATSSRRPLLLRAPQFT

SEQ ID NO: 29239 - protein, 16 aa, Homo sapiens
  ( 639 )...( 654 ): >TRX2_HUMAN
TSSRRPLLLRAPQFTP

SEQ ID NO: 29240 - protein, 16 aa, Homo sapiens
  ( 791 )...( 806 ): >TRX2_HUMAN
KMFSLLKRAKVQLFKI

SEQ ID NO: 29241 - protein, 16 aa, Homo sapiens
  ( 792 )...( 807 ): >TRX2_HUMAN
MFSLLKRAKVQLFKID

SEQ ID NO: 29242 - protein, 16 aa, Homo sapiens
  ( 793 )...( 808 ): >TRX2_HUMAN
FSLLKRAKVQLFKIDQ

SEQ ID NO: 29243 - protein, 16 aa, Homo sapiens
  ( 794 )...( 809 ): >TRX2_HUMAN
SLLKRAKVQLFKIDQQ

SEQ ID NO: 29244 - protein, 16 aa, Homo sapiens
  ( 795 )...( 810 ): >TRX2_HUMAN
LLKRAKVQLFKIDQQQ

SEQ ID NO: 29245 - protein, 16 aa, Homo sapiens
  ( 863 )...( 878 ): >TRX2_HUMAN
VQGPRIKHVCRHAAVA

SEQ ID NO: 29246 - protein, 16 aa, Homo sapiens
  ( 864 )...( 879 ): >TRX2_HUMAN
QGPRIKHVCRHAAVAL

SEQ ID NO: 29247 - protein, 16 aa, Homo sapiens
  ( 866 )...( 881 ): >TRX2_HUMAN
PRIKHVCRHAAVALGQ

SEQ ID NO: 29248 - protein, 16 aa, Homo sapiens
  ( 867 )...( 882 ): >TRX2_HUMAN
RIKHVCRHAAVALGQA

SEQ ID NO: 29249 - protein, 16 aa, Homo sapiens
  ( 868 )...( 883 ): >TRX2_HUMAN
IKHVCRHAAVALGQAR

SEQ ID NO: 29250 - protein, 16 aa, Homo sapiens
  ( 1005 )...( 1020 ): >TRX2_HUMAN
CDKIEARKMERLAKKG

SEQ ID NO: 29251 - protein, 16 aa, Homo sapiens
  ( 1007 )...( 1022 ): >TRX2_HUMAN
KIEARKMERLAKKGRT

SEQ ID NO: 29252 - protein, 16 aa, Homo sapiens
  ( 1008 )...( 1023 ): >TRX2_HUMAN
IEARKMERLAKKGRTI

SEQ ID NO: 29253 - protein, 16 aa, Homo sapiens
  ( 1009 )...( 1024 ): >TRX2_HUMAN
EARKMERLAKKGRTIV

SEQ ID NO: 29254 - protein, 16 aa, Homo sapiens
  ( 1010 )...( 1025 ): >TRX2_HUMAN
ARKMERLAKKGRTIVK

SEQ ID NO: 29255 - protein, 16 aa, Homo sapiens
  ( 1011 )...( 1026 ): >TRX2_HUMAN
RKMERLAKKGRTIVKT

SEQ ID NO: 29256 - protein, 16 aa, Homo sapiens
  ( 1012 )...( 1027 ): >TRX2_HUMAN
KMERLAKKGRTIVKTL

SEQ ID NO: 29257 - protein, 16 aa, Homo sapiens
  ( 1013 )...( 1028 ): >TRX2_HUMAN
MERLAKKGRTIVKTLL

SEQ ID NO: 29258 - protein, 16 aa, Homo sapiens
  ( 1014 )...( 1029 ): >TRX2_HUMAN
ERLAKKGRTIVKTLLP

SEQ ID NO: 29259 - protein, 16 aa, Homo sapiens
  ( 1015 )...( 1030 ): >TRX2_HUMAN
RLAKKGRTIVKTLLPW

SEQ ID NO: 29260 - protein, 16 aa, Homo sapiens
  ( 1016 )...( 1031 ): >TRX2_HUMAN
LAKKGRTIVKTLLPWD

SEQ ID NO: 29261 - protein, 16 aa, Homo sapiens
  ( 1017 )...( 1032 ): >TRX2_HUMAN
AKKGRTIVKTLLPWDS

SEQ ID NO: 29262 - protein, 16 aa, Homo sapiens
  ( 1121 )...( 1136 ): >TRX2_HUMAN
QSRPRKPTLQPVLQLK

SEQ ID NO: 29263 - protein, 16 aa, Homo sapiens
  ( 1122 )...( 1137 ): >TRX2_HUMAN
SRPRKPTLQPVLQLKA

SEQ ID NO: 29264 - protein, 16 aa, Homo sapiens
  ( 1126 )...( 1141 ): >TRX2_HUMAN
KPTLQPVLQLKARRRL

SEQ ID NO: 29265 - protein, 16 aa, Homo sapiens
  ( 1127 )...( 1142 ): >TRX2_HUMAN
PTLQPVLQLKARRRLD

SEQ ID NO: 29266 - protein, 16 aa, Homo sapiens
  ( 1128 )...( 1143 ): >TRX2_HUMAN
TLQPVLQLKARRRLDK

SEQ ID NO: 29267 - protein, 16 aa, Homo sapiens
  ( 1131 )...( 1146 ): >TRX2_HUMAN
PVLQLKARRRLDKDAL

SEQ ID NO: 29268 - protein, 16 aa, Homo sapiens
  ( 1132 )...( 1147 ): >TRX2_HUMAN
VLQLKARRRLDKDALA

SEQ ID NO: 29269 - protein, 16 aa, Homo sapiens
  ( 1133 )...( 1148 ): >TRX2_HUMAN
LQLKARRRLDKDALAP

SEQ ID NO: 29270 - protein, 16 aa, Homo sapiens
  ( 1134 )...( 1149 ): >TRX2_HUMAN
QLKARRRLDKDALAPG

SEQ ID NO: 29271 - protein, 16 aa, Homo sapiens
  ( 1135 )...( 1150 ): >TRX2_HUMAN
LKARRRLDKDALAPGP

SEQ ID NO: 29272 - protein, 16 aa, Homo sapiens
  ( 1157 )...( 1172 ): >TRX2_HUMAN
GWTGKQKSPDGVHRVR

SEQ ID NO: 29273 - protein, 16 aa, Homo sapiens
  ( 1158 )...( 1173 ): >TRX2_HUMAN
WTGKQKSPDGVHRVRV

SEQ ID NO: 29274 - protein, 16 aa, Homo sapiens
  ( 1257 )...( 1272 ): >TRX2_HUMAN
RKGRGSKHLLECERCR

SEQ ID NO: 29275 - protein, 16 aa, Homo sapiens
  ( 1258 )...( 1273 ): >TRX2_HUMAN
KGRGSKHLLECERCRH

SEQ ID NO: 29276 - protein, 16 aa, Homo sapiens
  ( 1278 )...( 1293 ): >TRX2_HUMAN
ACLGPSYPTRATRKRR

SEQ ID NO: 29277 - protein, 16 aa, Homo sapiens
  ( 1286 )...( 1301 ): >TRX2_HUMAN
TRATRKRRHWICSACV

SEQ ID NO: 29278 - protein, 16 aa, Homo sapiens
  ( 1484 )...( 1499 ): >TRX2_HUMAN
TPDRRAGGQMKGLLLK

SEQ ID NO: 29279 - protein, 16 aa, Homo sapiens
  ( 1485 )...( 1500 ): >TRX2_HUMAN
PDRRAGGQMKGLLLKL

SEQ ID NO: 29280 - protein, 16 aa, Homo sapiens
  ( 1486 )...( 1501 ): >TRX2_HUMAN
DRRAGGQMKGLLLKLL

SEQ ID NO: 29281 - protein, 16 aa, Homo sapiens
  ( 1487 )...( 1502 ): >TRX2_HUMAN
RRAGGQMKGLLLKLLE

SEQ ID NO: 29282 - protein, 16 aa, Homo sapiens
  ( 1516 )...( 1531 ): >TRX2_HUMAN
WRRSTRLPNGVLPNAV

SEQ ID NO: 29283 - protein, 16 aa, Homo sapiens
  ( 1517 )...( 1532 ): >TRX2_HUMAN
RRSTRLPNGVLPNAVL

SEQ ID NO: 29284 - protein, 16 aa, Homo sapiens
  ( 1624 )...( 1639 ): >TRX2_HUMAN
GSLKNVHAAVARGRQM

SEQ ID NO: 29285 - protein, 16 aa, Homo sapiens
  ( 1625 )...( 1640 ): >TRX2_HUMAN
SLKNVHAAVARGRQMR

SEQ ID NO: 29286 - protein, 16 aa, Homo sapiens
  ( 1626 )...( 1641 ): >TRX2_HUMAN
LKNVHAAVARGRQMRC

SEQ ID NO: 29287 - protein, 16 aa, Homo sapiens
  ( 1627 )...( 1642 ): >TRX2_HUMAN
KNVHAAVARGRQMRCE

SEQ ID NO: 29288 - protein, 16 aa, Homo sapiens
  ( 1631 )...( 1646 ): >TRX2_HUMAN
AAVARGRQMRCELCLK

SEQ ID NO: 29289 - protein, 16 aa, Homo sapiens
  ( 2189 )...( 2204 ): >TRX2_HUMAN
SKIILVNKLGQVFVKM

SEQ ID NO: 29290 - protein, 16 aa, Homo sapiens
  ( 2190 )...( 2205 ): >TRX2_HUMAN
KIILVNKLGQVFVKMA

SEQ ID NO: 29291 - protein, 16 aa, Homo sapiens
  ( 2266 )...( 2281 ): >TRX2_HUMAN
SGPASPPRQAIRVKRV

SEQ ID NO: 29292 - protein, 16 aa, Homo sapiens
  ( 2267 )...( 2282 ): >TRX2_HUMAN
GPASPPRQAIRVKRVS

SEQ ID NO: 29293 - protein, 16 aa, Homo sapiens
  ( 2268 )...( 2283 ): >TRX2_HUMAN
PASPPRQAIRVKRVST

SEQ ID NO: 29294 - protein, 16 aa, Homo sapiens
  ( 2269 )...( 2284 ): >TRX2_HUMAN
ASPPRQAIRVKRVSTF

SEQ ID NO: 29295 - protein, 16 aa, Homo sapiens
  ( 2270 )...( 2285 ): >TRX2_HUMAN
SPPRQAIRVKRVSTFS

SEQ ID NO: 29296 - protein, 16 aa, Homo sapiens
  ( 2271 )...( 2286 ): >TRX2_HUMAN
PPRQAIRVKRVSTFSG

SEQ ID NO: 29297 - protein, 16 aa, Homo sapiens
  ( 2272 )...( 2287 ): >TRX2_HUMAN
PRQAIRVKRVSTFSGR

SEQ ID NO: 29298 - protein, 16 aa, Homo sapiens
  ( 2273 )...( 2288 ): >TRX2_HUMAN
RQAIRVKRVSTFSGRS

SEQ ID NO: 29299 - protein, 16 aa, Homo sapiens
  ( 2274 )...( 2289 ): >TRX2_HUMAN
QAIRVKRVSTFSGRSP

SEQ ID NO: 29300 - protein, 16 aa, Homo sapiens
  ( 2275 )...( 2290 ): >TRX2_HUMAN
AIRVKRVSTFSGRSPP

SEQ ID NO: 29301 - protein, 16 aa, Homo sapiens
  ( 2276 )...( 2291 ): >TRX2_HUMAN
IRVKRVSTFSGRSPPA

SEQ ID NO: 29302 - protein, 16 aa, Homo sapiens
  ( 2316 )...( 2331 ): >TRX2_HUMAN
LGSGGFSRVRMKTPTV

SEQ ID NO: 29303 - protein, 16 aa, Homo sapiens
  ( 2317 )...( 2332 ): >TRX2_HUMAN
GSGGFSRVRMKTPTVR

SEQ ID NO: 29304 - protein, 16 aa, Homo sapiens
  ( 2318 )...( 2333 ): >TRX2_HUMAN
SGGFSRVRMKTPTVRG

SEQ ID NO: 29305 - protein, 16 aa, Homo sapiens
  ( 2319 )...( 2334 ): >TRX2_HUMAN
GGFSRVRMKTPTVRGV

SEQ ID NO: 29306 - protein, 16 aa, Homo sapiens
  ( 2320 )...( 2335 ): >TRX2_HUMAN
GFSRVRMKTPTVRGVL

SEQ ID NO: 29307 - protein, 16 aa, Homo sapiens
  ( 2321 )...( 2336 ): >TRX2_HUMAN
FSRVRMKTPTVRGVLD

SEQ ID NO: 29308 - protein, 16 aa, Homo sapiens
  ( 2322 )...( 2337 ): >TRX2_HUMAN
SRVRMKTPTVRGVLDL

SEQ ID NO: 29309 - protein, 16 aa, Homo sapiens
  ( 2441 )...( 2456 ): >TRX2_HUMAN
KVQEARGHARLRHLSF

SEQ ID NO: 29310 - protein, 16 aa, Homo sapiens
  ( 2450 )...( 2465 ): >TRX2_HUMAN
RLRHLSFSGMSGARLL

SEQ ID NO: 29311 - protein, 16 aa, Homo sapiens
  ( 2550 )...( 2565 ): >TRX2_HUMAN
RSTRRATSLELPMAMR

SEQ ID NO: 29312 - protein, 16 aa, Homo sapiens
  ( 2552 )...( 2567 ): >TRX2_HUMAN
TRRATSLELPMAMRFR

SEQ ID NO: 29313 - protein, 16 aa, Homo sapiens
  ( 2562 )...( 2577 ): >TRX2_HUMAN
MAMRFRHLKKTSKEAV

SEQ ID NO: 29314 - protein, 16 aa, Homo sapiens
  ( 2563 )...( 2578 ): >TRX2_HUMAN
AMRFRHLKKTSKEAVG

SEQ ID NO: 29315 - protein, 16 aa, Homo sapiens
  ( 2564 )...( 2579 ): >TRX2_HUMAN
MRFRHLKKTSKEAVGV

SEQ ID NO: 29316 - protein, 16 aa, Homo sapiens
  ( 2565 )...( 2580 ): >TRX2_HUMAN
RFRHLKKTSKEAVGVY

SEQ ID NO: 29317 - protein, 16 aa, Homo sapiens
  ( 2566 )...( 2581 ): >TRX2_HUMAN
FRHLKKTSKEAVGVYR

SEQ ID NO: 29318 - protein, 16 aa, Homo sapiens
  ( 2567 )...( 2582 ): >TRX2_HUMAN
RHLKKTSKEAVGVYRS

SEQ ID NO: 29319 - protein, 16 aa, Homo sapiens
  ( 2578 )...( 2593 ): >TRX2_HUMAN
GVYRSAIHGRGLFCKR

SEQ ID NO: 29320 - protein, 16 aa, Homo sapiens
  ( 2580 )...( 2595 ): >TRX2_HUMAN
YRSAIHGRGLFCKRNI

SEQ ID NO: 29321 - protein, 16 aa, Homo sapiens
  ( 2667 )...( 2682 ): >TRX2_HUMAN
EGQKHIVIFALRRILR

SEQ ID NO: 29322 - protein, 16 aa, Homo sapiens
  ( 2668 )...( 2683 ): >TRX2_HUMAN
GQKHIVIFALRRILRG

SEQ ID NO: 29323 - protein, 16 aa, Homo sapiens
  ( 2669 )...( 2684 ): >TRX2_HUMAN
QKHIVIFALRRILRGE

SEQ ID NO: 29324 - protein, 16 aa, Homo sapiens
  ( 250 )...( 265 ): >TTF1_HUMAN
AQQQSPRRVAVPVLVK

SEQ ID NO: 29325 - protein, 16 aa, Homo sapiens
  ( 253 )...( 268 ): >TTF1_HUMAN
QSPRRVAVPVLVKDGK

SEQ ID NO: 29326 - protein, 16 aa, Homo sapiens
  ( 254 )...( 269 ): >TTF1_HUMAN
SPRRVAVPVLVKDGKP

SEQ ID NO: 29327 - protein, 16 aa, Homo sapiens
  ( 256 )...( 271 ): >TTF1_HUMAN
RRVAVPVLVKDGKPCQ

SEQ ID NO: 29328 - protein, 16 aa, Homo sapiens
  ( 106 )...( 121 ): >TWST_HUMAN
LQTQRVMANVRERQRT

SEQ ID NO: 29329 - protein, 16 aa, Homo sapiens
  ( 141 )...( 156 ): >TWST_HUMAN
DKLSKIQTLKLAARYI

SEQ ID NO: 29330 - protein, 16 aa, Homo sapiens
  ( 142 )...( 157 ): >TWST_HUMAN
KLSKIQTLKLAARYID

SEQ ID NO: 29331 - protein, 16 aa, Homo sapiens
  ( 134 )...( 149 ): >TX21_HUMAN
SGKLRVALNNHLLWSK

SEQ ID NO: 29332 - protein, 16 aa, Homo sapiens
  ( 157 )...( 172 ): >TX21_HUMAN
MIITKQGRRMFPFLSF

SEQ ID NO: 29333 - protein, 16 aa, Homo sapiens
  ( 158 )...( 173 ): >TX21_HUMAN
IITKQGRRMFPFLSFT

SEQ ID NO: 29334 - protein, 16 aa, Homo sapiens
  ( 159 )...( 174 ): >TX21_HUMAN
ITKQGRRMFPFLSFTV

SEQ ID NO: 29335 - protein, 16 aa, Homo sapiens
  ( 233 )...( 248 ): >TX21_HUMAN
MRQEVSFGKLKLTNNK

SEQ ID NO: 29336 - protein, 16 aa, Homo sapiens
  ( 234 )...( 249 ): >TX21_HUMAN
RQEVSFGKLKLTNNKG

SEQ ID NO: 29337 - protein, 16 aa, Homo sapiens
  ( 170 )...( 185 ): >TYY1_HUMAN
GRVKKGGGKKSGKKSY

SEQ ID NO: 29338 - protein, 16 aa, Homo sapiens
  ( 171 )...( 186 ): >TYY1_HUMAN
RVKKGGGKKSGKKSYL

SEQ ID NO: 29339 - protein, 16 aa, Homo sapiens
  ( 200 )...( 215 ): >TYY1_HUMAN
PGNKKWEQKQVQIKTL

SEQ ID NO: 29340 - protein, 16 aa, Homo sapiens
  ( 32 )...( 47 ): >WS14_HUMAN
PSLRRSAGGLLRSQVI

SEQ ID NO: 29341 - protein, 16 aa, Homo sapiens
  ( 33 )...( 48 ): >WS14_HUMAN
SLRRSAGGLLRSQVIH

SEQ ID NO: 29342 - protein, 16 aa, Homo sapiens
  ( 34 )...( 49 ): >WS14_HUMAN
LRRSAGGLLRSQVIHS

SEQ ID NO: 29343 - protein, 16 aa, Homo sapiens
  ( 35 )...( 50 ): >WS14_HUMAN
RRSAGGLLRSQVIHSG

SEQ ID NO: 29344 - protein, 16 aa, Homo sapiens
  ( 98 )...( 113 ): >WS14_HUMAN
SGKLVSPKWKNFKGLK

SEQ ID NO: 29345 - protein, 16 aa, Homo sapiens
  ( 99 )...( 114 ): >WS14_HUMAN
GKLVSPKWKNFKGLKL

SEQ ID NO: 29346 - protein, 16 aa, Homo sapiens
  ( 100 )...( 115 ): >WS14_HUMAN
KLVSPKWKNFKGLKLL

SEQ ID NO: 29347 - protein, 16 aa, Homo sapiens
  ( 110 )...( 125 ): >WS14_HUMAN
KGLKLLCRDKIRLNNA

SEQ ID NO: 29348 - protein, 16 aa, Homo sapiens
  ( 111 )...( 126 ): >WS14_HUMAN
GLKLLCRDKIRLNNAI

SEQ ID NO: 29349 - protein, 16 aa, Homo sapiens
  ( 131 )...( 146 ): >WS14_HUMAN
YIQYVKRRKSPVCGFV

SEQ ID NO: 29350 - protein, 16 aa, Homo sapiens
  ( 132 )...( 147 ): >WS14_HUMAN
IQYVKRRKSPVCGFVT

SEQ ID NO: 29351 - protein, 16 aa, Homo sapiens
  ( 134 )...( 149 ): >WS14_HUMAN
YVKRRKSPVCGFVTPL

SEQ ID NO: 29352 - protein, 16 aa, Homo sapiens
  ( 135 )...( 150 ): >WS14_HUMAN
VKRRKSPVCGFVTPLQ

SEQ ID NO: 29353 - protein, 16 aa, Homo sapiens
  ( 626 )...( 641 ): >WS14_HUMAN
LSVRVSPPQPILSRGR

SEQ ID NO: 29354 - protein, 16 aa, Homo sapiens
  ( 653 )...( 668 ): >WS14_HUMAN
THISAEQKRRFNIKLG

SEQ ID NO: 29355 - protein, 16 aa, Homo sapiens
  ( 660 )...( 675 ): >WS14_HUMAN
KRRFNIKLGFDTLHGL

SEQ ID NO: 29356 - protein, 16 aa, Homo sapiens
  ( 287 )...( 302 ): >WT1_HUMAN
RIHTHGVFRGIQDVRR

SEQ ID NO: 29357 - protein, 16 aa, Homo sapiens
  ( 300 )...( 315 ): >WT1_HUMAN
VRRVPGVAPTLVRSAS

SEQ ID NO: 29358 - protein, 16 aa, Homo sapiens
  ( 374 )...( 389 ): >WT1_HUMAN
QRRHTGVKPFQCKTCQ

SEQ ID NO: 29359 - protein, 16 aa, Homo sapiens
  ( 376 )...( 391 ): >WT1_HUMAN
RHTGVKPFQCKTCQRK

SEQ ID NO: 29360 - protein, 16 aa, Homo sapiens
  ( 47 )...( 62 ): >XBP1_HUMAN
PEAASGGLPQARKRQR

SEQ ID NO: 29361 - protein, 16 aa, Homo sapiens
  ( 48 )...( 63 ): >XBP1_HUMAN
EAASGGLPQARKRQRL

SEQ ID NO: 29362 - protein, 16 aa, Homo sapiens
  ( 49 )...( 64 ): >XBP1_HUMAN
AASGGLPQARKRQRLT

SEQ ID NO: 29363 - protein, 16 aa, Homo sapiens
  ( 50 )...( 65 ): >XBP1_HUMAN
ASGGLPQARKRQRLTH

SEQ ID NO: 29364 - protein, 16 aa, Homo sapiens
  ( 51 )...( 66 ): >XBP1_HUMAN
SGGLPQARKRQRLTHL

SEQ ID NO: 29365 - protein, 16 aa, Homo sapiens
  ( 52 )...( 67 ): >XBP1_HUMAN
GGLPQARKRQRLTHLS

SEQ ID NO: 29366 - protein, 16 aa, Homo sapiens
  ( 53 )...( 68 ): >XBP1_HUMAN
GLPQARKRQRLTHLSP

SEQ ID NO: 29367 - protein, 16 aa, Homo sapiens
  ( 70 )...( 85 ): >XBP1_HUMAN
EKALRRKLKNRVAAQT

SEQ ID NO: 29368 - protein, 16 aa, Homo sapiens
  ( 71 )...( 86 ): >XBP1_HUMAN
KALRRKLKNRVAAQTA

SEQ ID NO: 29369 - protein, 16 aa, Homo sapiens
  ( 77 )...( 92 ): >XBP1_HUMAN
LKNRVAAQTARDRKKA

SEQ ID NO: 29370 - protein, 16 aa, Homo sapiens
  ( 80 )...( 95 ): >XBP1_HUMAN
RVAAQTARDRKKARMS

SEQ ID NO: 29371 - protein, 16 aa, Homo sapiens
  ( 81 )...( 96 ): >XBP1_HUMAN
VAAQTARDRKKARMSE

SEQ ID NO: 29372 - protein, 16 aa, Homo sapiens
  ( 82 )...( 97 ): >XBP1_HUMAN
AAQTARDRKKARMSEL

SEQ ID NO: 29373 - protein, 16 aa, Homo sapiens
  ( 156 )...( 171 ): >XPB_HUMAN
IKLCTVSYGKVKLVLK

SEQ ID NO: 29374 - protein, 16 aa, Homo sapiens
  ( 157 )...( 172 ): >XPB_HUMAN
KLCTVSYGKVKLVLKH

SEQ ID NO: 29375 - protein, 16 aa, Homo sapiens
  ( 159 )...( 174 ): >XPB_HUMAN
CTVSYGKVKLVLKHNR

SEQ ID NO: 29376 - protein, 16 aa, Homo sapiens
  ( 160 )...( 175 ): >XPB_HUMAN
TVSYGKVKLVLKHNRY

SEQ ID NO: 29377 - protein, 16 aa, Homo sapiens
  ( 161 )...( 176 ): >XPB_HUMAN
VSYGKVKLVLKHNRYF

SEQ ID NO: 29378 - protein, 16 aa, Homo sapiens
  ( 162 )...( 177 ): >XPB_HUMAN
SYGKVKLVLKHNRYFV

SEQ ID NO: 29379 - protein, 16 aa, Homo sapiens
  ( 310 )...( 325 ): >XPB_HUMAN
LKPTAVLRPYQEKSLR

SEQ ID NO: 29380 - protein, 16 aa, Homo sapiens
  ( 312 )...( 327 ): >XPB_HUMAN
PTAVLRPYQEKSLRKM

SEQ ID NO: 29381 - protein, 16 aa, Homo sapiens
  ( 314 )...( 329 ): >XPB_HUMAN
AVLRPYQEKSLRKMFG

SEQ ID NO: 29382 - protein, 16 aa, Homo sapiens
  ( 320 )...( 335 ): >XPB_HUMAN
QEKSLRKMFGNGRARS

SEQ ID NO: 29383 - protein, 16 aa, Homo sapiens
  ( 321 )...( 336 ): >XPB_HUMAN
EKSLRKMFGNGRARSG

SEQ ID NO: 29384 - protein, 16 aa, Homo sapiens
  ( 322 )...( 337 ): >XPB_HUMAN
KSLRKMFGNGRARSGV

SEQ ID NO: 29385 - protein, 16 aa, Homo sapiens
  ( 323 )...( 338 ): >XPB_HUMAN
SLRKMFGNGRARSGVI

SEQ ID NO: 29386 - protein, 16 aa, Homo sapiens
  ( 324 )...( 339 ): >XPB_HUMAN
LRKMFGNGRARSGVIV

SEQ ID NO: 29387 - protein, 16 aa, Homo sapiens
  ( 325 )...( 340 ): >XPB_HUMAN
RKMFGNGRARSGVIVL

SEQ ID NO: 29388 - protein, 16 aa, Homo sapiens
  ( 443 )...( 458 ): >XPB_HUMAN
VHTIPAKMFRRVLTIV

SEQ ID NO: 29389 - protein, 16 aa, Homo sapiens
  ( 444 )...( 459 ): >XPB_HUMAN
HTIPAKMFRRVLTIVQ

SEQ ID NO: 29390 - protein, 16 aa, Homo sapiens
  ( 445 )...( 460 ): >XPB_HUMAN
TIPAKMFRRVLTIVQA

SEQ ID NO: 29391 - protein, 16 aa, Homo sapiens
  ( 446 )...( 461 ): >XPB_HUMAN
IPAKMFRRVLTIVQAH

SEQ ID NO: 29392 - protein, 16 aa, Homo sapiens
  ( 447 )...( 462 ): >XPB_HUMAN
PAKMFRRVLTIVQAHC

SEQ ID NO: 29393 - protein, 16 aa, Homo sapiens
  ( 448 )...( 463 ): >XPB_HUMAN
AKMFRRVLTIVQAHCK

SEQ ID NO: 29394 - protein, 16 aa, Homo sapiens
  ( 449 )...( 464 ): >XPB_HUMAN
KMFRRVLTIVQAHCKL

SEQ ID NO: 29395 - protein, 16 aa, Homo sapiens
  ( 450 )...( 465 ): >XPB_HUMAN
MFRRVLTIVQAHCKLG

SEQ ID NO: 29396 - protein, 16 aa, Homo sapiens
  ( 451 )...( 466 ): >XPB_HUMAN
FRRVLTIVQAHCKLGL

SEQ ID NO: 29397 - protein, 16 aa, Homo sapiens
  ( 452 )...( 467 ): >XPB_HUMAN
RRVLTIVQAHCKLGLT

SEQ ID NO: 29398 - protein, 16 aa, Homo sapiens
  ( 520 )...( 535 ): >XPB_HUMAN
REYVAIKTKKRILLYT

SEQ ID NO: 29399 - protein, 16 aa, Homo sapiens
  ( 521 )...( 536 ): >XPB_HUMAN
EYVAIKTKKRILLYTM

SEQ ID NO: 29400 - protein, 16 aa, Homo sapiens
  ( 522 )...( 537 ): >XPB_HUMAN
YVAIKTKKRILLYTMN

SEQ ID NO: 29401 - protein, 16 aa, Homo sapiens
  ( 523 )...( 538 ): >XPB_HUMAN
VAIKTKKRILLYTMNP

SEQ ID NO: 29402 - protein, 16 aa, Homo sapiens
  ( 524 )...( 539 ): >XPB_HUMAN
AIKTKKRILLYTMNPN

SEQ ID NO: 29403 - protein, 16 aa, Homo sapiens
  ( 628 )...( 643 ): >XPB_HUMAN
SHGGSRRQEAQRLGRV

SEQ ID NO: 29404 - protein, 16 aa, Homo sapiens
  ( 629 )...( 644 ): >XPB_HUMAN
HGGSRRQEAQRLGRVL

SEQ ID NO: 29405 - protein, 16 aa, Homo sapiens
  ( 630 )...( 645 ): >XPB_HUMAN
GGSRRQEAQRLGRVLR

SEQ ID NO: 29406 - protein, 16 aa, Homo sapiens
  ( 631 )...( 646 ): >XPB_HUMAN
GSRRQEAQRLGRVLRA

SEQ ID NO: 29407 - protein, 16 aa, Homo sapiens
  ( 632 )...( 647 ): >XPB_HUMAN
SRRQEAQRLGRVLRAK

SEQ ID NO: 29408 - protein, 16 aa, Homo sapiens
  ( 634 )...( 649 ): >XPB_HUMAN
RQEAQRLGRVLRAKKG

SEQ ID NO: 29409 - protein, 16 aa, Homo sapiens
  ( 635 )...( 650 ): >XPB_HUMAN
QEAQRLGRVLRAKKGM

SEQ ID NO: 29410 - protein, 16 aa, Homo sapiens
  ( 636 )...( 651 ): >XPB_HUMAN
EAQRLGRVLRAKKGMV

SEQ ID NO: 29411 - protein, 16 aa, Homo sapiens
  ( 637 )...( 652 ): >XPB_HUMAN
AQRLGRVLRAKKGMVA

SEQ ID NO: 29412 - protein, 16 aa, Homo sapiens
  ( 638 )...( 653 ): >XPB_HUMAN
QRLGRVLRAKKGMVAE

SEQ ID NO: 29413 - protein, 16 aa, Homo sapiens
  ( 639 )...( 654 ): >XPB_HUMAN
RLGRVLRAKKGMVAEE

SEQ ID NO: 29414 - protein, 16 aa, Homo sapiens
  ( 355 )...( 370 ): >XPD_HUMAN
PAFLSGLAQRVCIQRK

SEQ ID NO: 29415 - protein, 16 aa, Homo sapiens
  ( 356 )...( 371 ): >XPD_HUMAN
AFLSGLAQRVCIQRKP

SEQ ID NO: 29416 - protein, 16 aa, Homo sapiens
  ( 357 )...( 372 ): >XPD_HUMAN
FLSGLAQRVCIQRKPL

SEQ ID NO: 29417 - protein, 16 aa, Homo sapiens
  ( 358 )...( 373 ): >XPD_HUMAN
LSGLAQRVCIQRKPLR

SEQ ID NO: 29418 - protein, 16 aa, Homo sapiens
  ( 359 )...( 374 ): >XPD_HUMAN
SGLAQRVCIQRKPLRF

SEQ ID NO: 29419 - protein, 16 aa, Homo sapiens
  ( 360 )...( 375 ): >XPD_HUMAN
GLAQRVCIQRKPLRFC

SEQ ID NO: 29420 - protein, 16 aa, Homo sapiens
  ( 361 )...( 376 ): >XPD_HUMAN
LAQRVCIQRKPLRFCA

SEQ ID NO: 29421 - protein, 16 aa, Homo sapiens
  ( 362 )...( 377 ): >XPD_HUMAN
AQRVCIQRKPLRFCAE

SEQ ID NO: 29422 - protein, 16 aa, Homo sapiens
  ( 621 )...( 636 ): >XPD_HUMAN
FGVPYVYTQSRILKAR

SEQ ID NO: 29423 - protein, 16 aa, Homo sapiens
  ( 622 )...( 637 ): >XPD_HUMAN
GVPYVYTQSRILKARL

SEQ ID NO: 29424 - protein, 16 aa, Homo sapiens
  ( 656 )...( 671 ): >XPD_HUMAN
AMRHAAQCVGRAIRGK

SEQ ID NO: 29425 - protein, 16 aa, Homo sapiens
  ( 657 )...( 672 ): >XPD_HUMAN
MRHAAQCVGRAIRGKT

SEQ ID NO: 29426 - protein, 16 aa, Homo sapiens
  ( 658 )...( 673 ): >XPD_HUMAN
RHAAQCVGRAIRGKTD

SEQ ID NO: 29427 - protein, 16 aa, Homo sapiens
  ( 675 )...( 690 ): >XPD_HUMAN
GLMVFADKRFARGDKR

SEQ ID NO: 29428 - protein, 16 aa, Homo sapiens
  ( 676 )...( 691 ): >XPD_HUMAN
LMVFADKRFARGDKRG

SEQ ID NO: 29429 - protein, 16 aa, Homo sapiens
  ( 678 )...( 693 ): >XPD_HUMAN
VFADKRFARGDKRGKL

SEQ ID NO: 29430 - protein, 16 aa, Homo sapiens
  ( 260 )...( 275 ): >Y211_HUMAN
RELGTCSSVPPRQRLK

SEQ ID NO: 29431 - protein, 16 aa, Homo sapiens
  ( 329 )...( 344 ): >Y211_HUMAN
PKSPRSPLEATRKSIK

SEQ ID NO: 29432 - protein, 16 aa, Homo sapiens
  ( 330 )...( 345 ): >Y211_HUMAN
KSPRSPLEATRKSIKP

SEQ ID NO: 29433 - protein, 16 aa, Homo sapiens
  ( 366 )...( 381 ): >Y211_HUMAN
ASSPPAIPKVRIKTIK

SEQ ID NO: 29434 - protein, 16 aa, Homo sapiens
  ( 367 )...( 382 ): >Y211_HUMAN
SSPPAIPKVRIKTIKT

SEQ ID NO: 29435 - protein, 16 aa, Homo sapiens
  ( 368 )...( 383 ): >Y211_HUMAN
SPPAIPKVRIKTIKTS

SEQ ID NO: 29436 - protein, 16 aa, Homo sapiens
  ( 369 )...( 384 ): >Y211_HUMAN
PPAIPKVRIKTIKTSS

SEQ ID NO: 29437 - protein, 16 aa, Homo sapiens
  ( 370 )...( 385 ): >Y211_HUMAN
PAIPKVRIKTIKTSSG

SEQ ID NO: 29438 - protein, 16 aa, Homo sapiens
  ( 373 )...( 388 ): >Y211_HUMAN
PKVRIKTIKTSSGEIK

SEQ ID NO: 29439 - protein, 16 aa, Homo sapiens
  ( 374 )...( 389 ): >Y211_HUMAN
KVRIKTIKTSSGEIKR

SEQ ID NO: 29440 - protein, 16 aa, Homo sapiens
  ( 375 )...( 390 ): >Y211_HUMAN
VRIKTIKTSSGEIKRT

SEQ ID NO: 29441 - protein, 16 aa, Homo sapiens
  ( 376 )...( 391 ): >Y211_HUMAN
RIKTIKTSSGEIKRTV

SEQ ID NO: 29442 - protein, 16 aa, Homo sapiens
  ( 378 )...( 393 ): >Y211_HUMAN
KTIKTSSGEIKRTVTR

SEQ ID NO: 29443 - protein, 16 aa, Homo sapiens
  ( 515 )...( 530 ): >Y211_HUMAN
VAASVTAKSSVQRRSQ

SEQ ID NO: 29444 - protein, 16 aa, Homo sapiens
  ( 517 )...( 532 ): >Y211_HUMAN
ASVTAKSSVQRRSQPQ

SEQ ID NO: 29445 - protein, 16 aa, Homo sapiens
  ( 518 )...( 533 ): >Y211_HUMAN
SVTAKSSVQRRSQPQL

SEQ ID NO: 29446 - protein, 16 aa, Homo sapiens
  ( 519 )...( 534 ): >Y211_HUMAN
VTAKSSVQRRSQPQLT

SEQ ID NO: 29447 - protein, 16 aa, Homo sapiens
  ( 520 )...( 535 ): >Y211_HUMAN
TAKSSVQRRSQPQLTQ

SEQ ID NO: 29448 - protein, 16 aa, Homo sapiens
  ( 521 )...( 536 ): >Y211_HUMAN
AKSSVQRRSQPQLTQM

SEQ ID NO: 29449 - protein, 16 aa, Homo sapiens
  ( 522 )...( 537 ): >Y211_HUMAN
KSSVQRRSQPQLTQMS

SEQ ID NO: 29450 - protein, 16 aa, Homo sapiens
  ( 629 )...( 644 ): >Y211_HUMAN
KCSLLRHARDHKSKGL

SEQ ID NO: 29451 - protein, 16 aa, Homo sapiens
  ( 703 )...( 718 ): >Y211_HUMAN
PVRLIRYSIKCLECHK

SEQ ID NO: 29452 - protein, 16 aa, Homo sapiens
  ( 704 )...( 719 ): >Y211_HUMAN
VRLIRYSIKCLECHKQ

SEQ ID NO: 29453 - protein, 16 aa, Homo sapiens
  ( 795 )...( 810 ): >Y211_HUMAN
RKVGYRCIHCGVVHLT

SEQ ID NO: 29454 - protein, 16 aa, Homo sapiens
  ( 9 )...( 24 ): >Y222_HUMAN
MELRRGPSPTRAGRGH

SEQ ID NO: 29455 - protein, 16 aa, Homo sapiens
  ( 11 )...( 26 ): >Y222_HUMAN
LRRGPSPTRAGRGHEV

SEQ ID NO: 29456 - protein, 16 aa, Homo sapiens
  ( 71 )...( 86 ): >Y222_HUMAN
ASQKGNLKIHIRSHRT

SEQ ID NO: 29457 - protein, 16 aa, Homo sapiens
  ( 72 )...( 87 ): >Y222_HUMAN
SQKGNLKIHIRSHRTG

SEQ ID NO: 29458 - protein, 16 aa, Homo sapiens
  ( 73 )...( 88 ): >Y222_HUMAN
QKGNLKIHIRSHRTGT

SEQ ID NO: 29459 - protein, 16 aa, Homo sapiens
  ( 74 )...( 89 ): >Y222_HUMAN
KGNLKIHIRSHRTGTL

SEQ ID NO: 29460 - protein, 16 aa, Homo sapiens
  ( 143 )...( 158 ): >Y222_HUMAN
ASQADSGRVLLRSSKK

SEQ ID NO: 29461 - protein, 16 aa, Homo sapiens
  ( 144 )...( 159 ): >Y222_HUMAN
SQADSGRVLLRSSKKG

SEQ ID NO: 29462 - protein, 16 aa, Homo sapiens
  ( 145 )...( 160 ): >Y222_HUMAN
QADSGRVLLRSSKKGA

SEQ ID NO: 29463 - protein, 16 aa, Homo sapiens
  ( 352 )...( 367 ): >Y222_HUMAN
AHNAIHRRVEASRTRA

SEQ ID NO: 29464 - protein, 16 aa, Homo sapiens
  ( 354 )...( 369 ): >Y222_HUMAN
NAIHRRVEASRTRAPA

SEQ ID NO: 29465 - protein, 16 aa, Homo sapiens
  ( 496 )...( 511 ): >Y222_HUMAN
RSAARPNRRAAATTGQ

SEQ ID NO: 29466 - protein, 16 aa, Homo sapiens
  ( 800 )...( 815 ): >Y222_HUMAN
YKSIRSNLVFLSRSGR

SEQ ID NO: 29467 - protein, 16 aa, Homo sapiens
  ( 801 )...( 816 ): >Y222_HUMAN
KSIRSNLVFLSRSGRT

SEQ ID NO: 29468 - protein, 16 aa, Homo sapiens
  ( 802 )...( 817 ): >Y222_HUMAN
SIRSNLVFLSRSGRTG

SEQ ID NO: 29469 - protein, 16 aa, Homo sapiens
  ( 803 )...( 818 ): >Y222_HUMAN
IRSNLVFLSRSGRTGP

SEQ ID NO: 29470 - protein, 16 aa, Homo sapiens
  ( 54 )...( 69 ): >Y296_HUMAN
GRGYRHPGSLVNHRRT

SEQ ID NO: 29471 - protein, 16 aa, Homo sapiens
  ( 88 )...( 103 ): >Y296_HUMAN
MALKSHMRTHAPEGRR

SEQ ID NO: 29472 - protein, 16 aa, Homo sapiens
  ( 379 )...( 394 ): >Y296_HUMAN
CGRTYRHAGSLINHRK

SEQ ID NO: 29473 - protein, 16 aa, Homo sapiens
  ( 380 )...( 395 ): >Y296_HUMAN
GRTYRHAGSLINHRKS

SEQ ID NO: 29474 - protein, 16 aa, Homo sapiens
  ( 416 )...( 431 ): >Y296_HUMAN
LKNHVRAHHRPRQGVG

SEQ ID NO: 29475 - protein, 16 aa, Homo sapiens
  ( 504 )...( 519 ): >Y296_HUMAN
LMALRNHVRVHCKAAR

SEQ ID NO: 29476 - protein, 16 aa, Homo sapiens
  ( 887 )...( 902 ): >Y296_HUMAN
GMIFPGRAGYRLHRRQ

SEQ ID NO: 29477 - protein, 16 aa, Homo sapiens
  ( 892 )...( 907 ): >Y296_HUMAN
GRAGYRLHRRQAHSSS

SEQ ID NO: 29478 - protein, 16 aa, Homo sapiens
  ( 893 )...( 908 ): >Y296_HUMAN
RAGYRLHRRQAHSSSG

SEQ ID NO: 29479 - protein, 16 aa, Homo sapiens
  ( 1058 )...( 1073 ): >Y296_HUMAN
GKTYRHGGSLVNHRKI

SEQ ID NO: 29480 - protein, 16 aa, Homo sapiens
  ( 1059 )...( 1074 ): >Y296_HUMAN
KTYRHGGSLVNHRKIH

SEQ ID NO: 29481 - protein, 16 aa, Homo sapiens
  ( 1259 )...( 1274 ): >Y296_HUMAN
RCSECGKAFRLRKQLA

SEQ ID NO: 29482 - protein, 16 aa, Homo sapiens
  ( 1262 )...( 1277 ): >Y296_HUMAN
ECGKAFRLRKQLASHQ

SEQ ID NO: 29483 - protein, 16 aa, Homo sapiens
  ( 1264 )...( 1279 ): >Y296_HUMAN
GKAFRLRKQLASHQRV

SEQ ID NO: 29484 - protein, 16 aa, Homo sapiens
  ( 1271 )...( 1286 ): >Y296_HUMAN
KQLASHQRVHMERRGG

SEQ ID NO: 29485 - protein, 16 aa, Homo sapiens
  ( 1275 )...( 1290 ): >Y296_HUMAN
SHQRVHMERRGGGGTR

SEQ ID NO: 29486 - protein, 16 aa, Homo sapiens
  ( 1276 )...( 1291 ): >Y296_HUMAN
HQRVHMERRGGGGTRK

SEQ ID NO: 29487 - protein, 16 aa, Homo sapiens
  ( 1277 )...( 1292 ): >Y296_HUMAN
QRVHMERRGGGGTRKA

SEQ ID NO: 29488 - protein, 16 aa, Homo sapiens
  ( 1278 )...( 1293 ): >Y296_HUMAN
RVHMERRGGGGTRKAT

SEQ ID NO: 29489 - protein, 16 aa, Homo sapiens
  ( 1279 )...( 1294 ): >Y296_HUMAN
VHMERRGGGGTRKATR

SEQ ID NO: 29490 - protein, 16 aa, Homo sapiens
  ( 1284 )...( 1299 ): >Y296_HUMAN
RGGGGTRKATREDRPF

SEQ ID NO: 29491 - protein, 16 aa, Homo sapiens
  ( 1285 )...( 1300 ): >Y296_HUMAN
GGGGTRKATREDRPFR

SEQ ID NO: 29492 - protein, 16 aa, Homo sapiens
  ( 1288 )...( 1303 ): >Y296_HUMAN
GTRKATREDRPFRCGQ

SEQ ID NO: 29493 - protein, 16 aa, Homo sapiens
  ( 1355 )...( 1370 ): >Y296_HUMAN
RAGRSRRTAVRCALCG

SEQ ID NO: 29494 - protein, 16 aa, Homo sapiens
  ( 1356 )...( 1371 ): >Y296_HUMAN
AGRSRRTAVRCALCGR

SEQ ID NO: 29495 - protein, 16 aa, Homo sapiens
  ( 1357 )...( 1372 ): >Y296_HUMAN
GRSRRTAVRCALCGRS

SEQ ID NO: 29496 - protein, 16 aa, Homo sapiens
  ( 1358 )...( 1373 ): >Y296_HUMAN
RSRRTAVRCALCGRSF

SEQ ID NO: 29497 - protein, 16 aa, Homo sapiens
  ( 1738 )...( 1753 ): >Y296_HUMAN
GKAFRTAARLEGHGRV

SEQ ID NO: 29498 - protein, 16 aa, Homo sapiens
  ( 1739 )...( 1754 ): >Y296_HUMAN
KAFRTAARLEGHGRVH

SEQ ID NO: 29499 - protein, 16 aa, Homo sapiens
  ( 1742 )...( 1757 ): >Y296_HUMAN
RTAARLEGHGRVHAPR

SEQ ID NO: 29500 - protein, 16 aa, Homo sapiens
  ( 1805 )...( 1820 ): >Y296_HUMAN
TQWRGKSSPKVGGGAR

SEQ ID NO: 29501 - protein, 16 aa, Homo sapiens
  ( 1810 )...( 1825 ): >Y296_HUMAN
KSSPKVGGGARSERRE

SEQ ID NO: 29502 - protein, 16 aa, Homo sapiens
  ( 1812 )...( 1827 ): >Y296_HUMAN
SPKVGGGARSERREPR

SEQ ID NO: 29503 - protein, 16 aa, Homo sapiens
  ( 1813 )...( 1828 ): >Y296_HUMAN
PKVGGGARSERREPRG

SEQ ID NO: 29504 - protein, 16 aa, Homo sapiens
  ( 1814 )...( 1829 ): >Y296_HUMAN
KVGGGARSERREPRGF

SEQ ID NO: 29505 - protein, 16 aa, Homo sapiens
  ( 266 )...( 281 ): >Y798_HUMAN
CGKVFTMKSRLIEHQR

SEQ ID NO: 29506 - protein, 16 aa, Homo sapiens
  ( 294 )...( 309 ): >Y798_HUMAN
CGKGFPGKRNLIVHQR

SEQ ID NO: 29507 - protein, 16 aa, Homo sapiens
  ( 295 )...( 310 ): >Y798_HUMAN
GKGFPGKRNLIVHQRN

SEQ ID NO: 29508 - protein, 16 aa, Homo sapiens
  ( 297 )...( 312 ): >Y798_HUMAN
GFPGKRNLIVHQRNHT

SEQ ID NO: 29509 - protein, 16 aa, Homo sapiens
  ( 298 )...( 313 ): >Y798_HUMAN
FPGKRNLIVHQRNHTG

SEQ ID NO: 29510 - protein, 16 aa, Homo sapiens
  ( 407 )...( 422 ): >Y798_HUMAN
GKGFPRKSNLIVHQRN

SEQ ID NO: 29511 - protein, 16 aa, Homo sapiens
  ( 462 )...( 477 ): >Y798_HUMAN
CGKGFPLKSRLIVHQR

SEQ ID NO: 29512 - protein, 16 aa, Homo sapiens
  ( 463 )...( 478 ): >Y798_HUMAN
GKGFPLKSRLIVHQRT

SEQ ID NO: 29513 - protein, 16 aa, Homo sapiens
  ( 464 )...( 479 ): >Y798_HUMAN
KGFPLKSRLIVHQRTH

SEQ ID NO: 29514 - protein, 16 aa, Homo sapiens
  ( 546 )...( 561 ): >Y798_HUMAN
CGKGFTMKRYLIVHQQ

SEQ ID NO: 29515 - protein, 16 aa, Homo sapiens
  ( 547 )...( 562 ): >Y798_HUMAN
GKGFTMKRYLIVHQQI

SEQ ID NO: 29516 - protein, 16 aa, Homo sapiens
  ( 602 )...( 617 ): >Y798_HUMAN
CGKGFTMKSRLIVHQR

SEQ ID NO: 29517 - protein, 16 aa, Homo sapiens
  ( 603 )...( 618 ): >Y798_HUMAN
GKGFTMKSRLIVHQRT

SEQ ID NO: 29518 - protein, 16 aa, Homo sapiens
  ( 604 )...( 619 ): >Y798_HUMAN
KGFTMKSRLIVHQRTH

SEQ ID NO: 29519 - protein, 16 aa, Homo sapiens
  ( 16 )...( 31 ): >YB96_HUMAN
SKSGPGKDGSRKEVRL

SEQ ID NO: 29520 - protein, 16 aa, Homo sapiens
  ( 68 )...( 83 ): >YB96_HUMAN
KTEGKKKGRPKAENQA

SEQ ID NO: 29521 - protein, 16 aa, Homo sapiens
  ( 69 )...( 84 ): >YB96_HUMAN
TEGKKKGRPKAENQAL

SEQ ID NO: 29522 - protein, 16 aa, Homo sapiens
  ( 70 )...( 85 ): >YB96_HUMAN
EGKKKGRPKAENQALR

SEQ ID NO: 29523 - protein, 16 aa, Homo sapiens
  ( 71 )...( 86 ): >YB96_HUMAN
GKKKGRPKAENQALRD

SEQ ID NO: 29524 - protein, 16 aa, Homo sapiens
  ( 73 )...( 88 ): >YB96_HUMAN
KKGRPKAENQALRDIP

SEQ ID NO: 29525 - protein, 16 aa, Homo sapiens
  ( 175 )...( 190 ): >YB96_HUMAN
PISRPVTISRPVGVSK

SEQ ID NO: 29526 - protein, 16 aa, Homo sapiens
  ( 176 )...( 191 ): >YB96_HUMAN
ISRPVTISRPVGVSKP

SEQ ID NO: 29527 - protein, 16 aa, Homo sapiens
  ( 177 )...( 192 ): >YB96_HUMAN
SRPVTISRPVGVSKPI

SEQ ID NO: 29528 - protein, 16 aa, Homo sapiens
  ( 178 )...( 193 ): >YB96_HUMAN
RPVTISRPVGVSKPIG

SEQ ID NO: 29529 - protein, 16 aa, Homo sapiens
  ( 217 )...( 232 ): >YB96_HUMAN
SVGRPMPVTKAIPVTR

SEQ ID NO: 29530 - protein, 16 aa, Homo sapiens
  ( 218 )...( 233 ): >YB96_HUMAN
VGRPMPVTKAIPVTRP

SEQ ID NO: 29531 - protein, 16 aa, Homo sapiens
  ( 219 )...( 234 ): >YB96_HUMAN
GRPMPVTKAIPVTRPV

SEQ ID NO: 29532 - protein, 16 aa, Homo sapiens
  ( 223 )...( 238 ): >YB96_HUMAN
PVTKAIPVTRPVPVTK

SEQ ID NO: 29533 - protein, 16 aa, Homo sapiens
  ( 224 )...( 239 ): >YB96_HUMAN
VTKAIPVTRPVPVTKP

SEQ ID NO: 29534 - protein, 16 aa, Homo sapiens
  ( 225 )...( 240 ): >YB96_HUMAN
TKAIPVTRPVPVTKPV

SEQ ID NO: 29535 - protein, 16 aa, Homo sapiens
  ( 226 )...( 241 ): >YB96_HUMAN
KAIPVTRPVPVTKPVT

SEQ ID NO: 29536 - protein, 16 aa, Homo sapiens
  ( 229 )...( 244 ): >YB96_HUMAN
PVTRPVPVTKPVTVSR

SEQ ID NO: 29537 - protein, 16 aa, Homo sapiens
  ( 230 )...( 245 ): >YB96_HUMAN
VTRPVPVTKPVTVSRP

SEQ ID NO: 29538 - protein, 16 aa, Homo sapiens
  ( 231 )...( 246 ): >YB96_HUMAN
TRPVPVTKPVTVSRPM

SEQ ID NO: 29539 - protein, 16 aa, Homo sapiens
  ( 286 )...( 301 ): >YB96_HUMAN
KPVPVTKPVTVSRPIV

SEQ ID NO: 29540 - protein, 16 aa, Homo sapiens
  ( 295 )...( 310 ): >YB96_HUMAN
TVSRPIVVSKPVTVSR

SEQ ID NO: 29541 - protein, 16 aa, Homo sapiens
  ( 296 )...( 311 ): >YB96_HUMAN
VSRPIVVSKPVTVSRP

SEQ ID NO: 29542 - protein, 16 aa, Homo sapiens
  ( 297 )...( 312 ): >YB96_HUMAN
SRPIVVSKPVTVSRPI

SEQ ID NO: 29543 - protein, 16 aa, Homo sapiens
  ( 298 )...( 313 ): >YB96_HUMAN
RPIVVSKPVTVSRPIA

SEQ ID NO: 29544 - protein, 16 aa, Homo sapiens
  ( 301 )...( 316 ): >YB96_HUMAN
VVSKPVTVSRPIAISR

SEQ ID NO: 29545 - protein, 16 aa, Homo sapiens
  ( 322 )...( 337 ): >YB96_HUMAN
KMVLLTRSENKAPRAT

SEQ ID NO: 29546 - protein, 16 aa, Homo sapiens
  ( 324 )...( 339 ): >YB96_HUMAN
VLLTRSENKAPRATGR

SEQ ID NO: 29547 - protein, 16 aa, Homo sapiens
  ( 325 )...( 340 ): >YB96_HUMAN
LLTRSENKAPRATGRN

SEQ ID NO: 29548 - protein, 16 aa, Homo sapiens
  ( 326 )...( 341 ): >YB96_HUMAN
LTRSENKAPRATGRNS

SEQ ID NO: 29549 - protein, 16 aa, Homo sapiens
  ( 331 )...( 346 ): >YB96_HUMAN
NKAPRATGRNSGKKRA

SEQ ID NO: 29550 - protein, 16 aa, Homo sapiens
  ( 332 )...( 347 ): >YB96_HUMAN
KAPRATGRNSGKKRAA

SEQ ID NO: 29551 - protein, 16 aa, Homo sapiens
  ( 335 )...( 350 ): >YB96_HUMAN
RATGRNSGKKRAADSL

SEQ ID NO: 29552 - protein, 16 aa, Homo sapiens
  ( 422 )...( 437 ): >YB96_HUMAN
RKQKTPKKFTGEQPSI

SEQ ID NO: 29553 - protein, 16 aa, Homo sapiens
  ( 442 )...( 457 ): >YB96_HUMAN
GLKGLVKAEDKARVHR

SEQ ID NO: 29554 - protein, 16 aa, Homo sapiens
  ( 443 )...( 458 ): >YB96_HUMAN
LKGLVKAEDKARVHRS

SEQ ID NO: 29555 - protein, 16 aa, Homo sapiens
  ( 444 )...( 459 ): >YB96_HUMAN
KGLVKAEDKARVHRSK

SEQ ID NO: 29556 - protein, 16 aa, Homo sapiens
  ( 445 )...( 460 ): >YB96_HUMAN
GLVKAEDKARVHRSKK

SEQ ID NO: 29557 - protein, 16 aa, Homo sapiens
  ( 446 )...( 461 ): >YB96_HUMAN
LVKAEDKARVHRSKKQ

SEQ ID NO: 29558 - protein, 16 aa, Homo sapiens
  ( 451 )...( 466 ): >YB96_HUMAN
DKARVHRSKKQEGPGP

SEQ ID NO: 29559 - protein, 16 aa, Homo sapiens
  ( 452 )...( 467 ): >YB96_HUMAN
KARVHRSKKQEGPGPE

SEQ ID NO: 29560 - protein, 16 aa, Homo sapiens
  ( 469 )...( 484 ): >YB96_HUMAN
ARKKVPAAPITVSKEA

SEQ ID NO: 29561 - protein, 16 aa, Homo sapiens
  ( 513 )...( 528 ): >YB96_HUMAN
PTCNVVTRKTLVGLKK

SEQ ID NO: 29562 - protein, 16 aa, Homo sapiens
  ( 514 )...( 529 ): >YB96_HUMAN
TCNVVTRKTLVGLKKH

SEQ ID NO: 29563 - protein, 16 aa, Homo sapiens
  ( 515 )...( 530 ): >YB96_HUMAN
CNVVTRKTLVGLKKHM

SEQ ID NO: 29564 - protein, 16 aa, Homo sapiens
  ( 520 )...( 535 ): >YB96_HUMAN
RKTLVGLKKHMEVCQK

SEQ ID NO: 29565 - protein, 16 aa, Homo sapiens
  ( 584 )...( 599 ): >YB96_HUMAN
LRKVLKQMGRLRCPQE

SEQ ID NO: 29566 - protein, 16 aa, Homo sapiens
  ( 585 )...( 600 ): >YB96_HUMAN
RKVLKQMGRLRCPQEG

SEQ ID NO: 29567 - protein, 16 aa, Homo sapiens
  ( 586 )...( 601 ): >YB96_HUMAN
KVLKQMGRLRCPQEGC

SEQ ID NO: 29568 - protein, 16 aa, Homo sapiens
  ( 671 )...( 686 ): >YB96_HUMAN
PLGVERTPSGRVRRTS

SEQ ID NO: 29569 - protein, 16 aa, Homo sapiens
  ( 672 )...( 687 ): >YB96_HUMAN
LGVERTPSGRVRRTSA

SEQ ID NO: 29570 - protein, 16 aa, Homo sapiens
  ( 673 )...( 688 ): >YB96_HUMAN
GVERTPSGRVRRTSAQ

SEQ ID NO: 29571 - protein, 16 aa, Homo sapiens
  ( 674 )...( 689 ): >YB96_HUMAN
VERTPSGRVRRTSAQV

SEQ ID NO: 29572 - protein, 16 aa, Homo sapiens
  ( 675 )...( 690 ): >YB96_HUMAN
ERTPSGRVRRTSAQVA

SEQ ID NO: 29573 - protein, 16 aa, Homo sapiens
  ( 676 )...( 691 ): >YB96_HUMAN
RTPSGRVRRTSAQVAV

SEQ ID NO: 29574 - protein, 16 aa, Homo sapiens
  ( 677 )...( 692 ): >YB96_HUMAN
TPSGRVRRTSAQVAVF

SEQ ID NO: 29575 - protein, 16 aa, Homo sapiens
  ( 678 )...( 693 ): >YB96_HUMAN
PSGRVRRTSAQVAVFH

SEQ ID NO: 29576 - protein, 16 aa, Homo sapiens
  ( 679 )...( 694 ): >YB96_HUMAN
SGRVRRTSAQVAVFHL

SEQ ID NO: 29577 - protein, 16 aa, Homo sapiens
  ( 680 )...( 695 ): >YB96_HUMAN
GRVRRTSAQVAVFHLQ

SEQ ID NO: 29578 - protein, 16 aa, Homo sapiens
  ( 827 )...( 842 ): >YB96_HUMAN
SLVPKKEKKKNLAGGK

SEQ ID NO: 29579 - protein, 16 aa, Homo sapiens
  ( 828 )...( 843 ): >YB96_HUMAN
LVPKKEKKKNLAGGKK

SEQ ID NO: 29580 - protein, 16 aa, Homo sapiens
  ( 829 )...( 844 ): >YB96_HUMAN
VPKKEKKKNLAGGKKR

SEQ ID NO: 29581 - protein, 16 aa, Homo sapiens
  ( 830 )...( 845 ): >YB96_HUMAN
PKKEKKKNLAGGKKRG

SEQ ID NO: 29582 - protein, 16 aa, Homo sapiens
  ( 833 )...( 848 ): >YB96_HUMAN
EKKKNLAGGKKRGRKP

SEQ ID NO: 29583 - protein, 16 aa, Homo sapiens
  ( 835 )...( 850 ): >YB96_HUMAN
KKNLAGGKKRGRKPKE

SEQ ID NO: 29584 - protein, 16 aa, Homo sapiens
  ( 837 )...( 852 ): >YB96_HUMAN
NLAGGKKRGRKPKERT

SEQ ID NO: 29585 - protein, 16 aa, Homo sapiens
  ( 838 )...( 853 ): >YB96_HUMAN
LAGGKKRGRKPKERTP

SEQ ID NO: 29586 - protein, 16 aa, Homo sapiens
  ( 839 )...( 854 ): >YB96_HUMAN
AGGKKRGRKPKERTPE

SEQ ID NO: 29587 - protein, 16 aa, Homo sapiens
  ( 252 )...( 267 ): >YB98_HUMAN
CKECGKAFRYLTALRR

SEQ ID NO: 29588 - protein, 16 aa, Homo sapiens
  ( 340 )...( 355 ): >YB98_HUMAN
GRAFFSHSSLRKHVKT

SEQ ID NO: 29589 - protein, 16 aa, Homo sapiens
  ( 480 )...( 495 ): >YB98_HUMAN
GKAFTCLNSLKVHKRI

SEQ ID NO: 29590 - protein, 16 aa, Homo sapiens
  ( 481 )...( 496 ): >YB98_HUMAN
KAFTCLNSLKVHKRIH

SEQ ID NO: 29591 - protein, 16 aa, Homo sapiens
  ( 325 )...( 340 ): >YC24_HUMAN
CGRPFRVSSALIRHQR

SEQ ID NO: 29592 - protein, 16 aa, Homo sapiens
  ( 326 )...( 341 ): >YC24_HUMAN
GRPFRVSSALIRHQRI

SEQ ID NO: 29593 - protein, 16 aa, Homo sapiens
  ( 329 )...( 344 ): >YC24_HUMAN
FRVSSALIRHQRIHTA

SEQ ID NO: 29594 - protein, 16 aa, Homo sapiens
  ( 330 )...( 345 ): >YC24_HUMAN
RVSSALIRHQRIHTAN

SEQ ID NO: 29595 - protein, 16 aa, Homo sapiens
  ( 60 )...( 75 ): >YD49_HUMAN
LSQRIIPLKKTPTSQR

SEQ ID NO: 29596 - protein, 16 aa, Homo sapiens
  ( 61 )...( 76 ): >YD49_HUMAN
SQRIIPLKKTPTSQRG

SEQ ID NO: 29597 - protein, 16 aa, Homo sapiens
  ( 62 )...( 77 ): >YD49_HUMAN
QRIIPLKKTPTSQRGF

SEQ ID NO: 29598 - protein, 16 aa, Homo sapiens
  ( 63 )...( 78 ): >YD49_HUMAN
RIIPLKKTPTSQRGFR

SEQ ID NO: 29599 - protein, 16 aa, Homo sapiens
  ( 64 )...( 79 ): >YD49_HUMAN
IIPLKKTPTSQRGFRF

SEQ ID NO: 29600 - protein, 16 aa, Homo sapiens
  ( 65 )...( 80 ): >YD49_HUMAN
IPLKKTPTSQRGFRFE

SEQ ID NO: 29601 - protein, 16 aa, Homo sapiens
  ( 67 )...( 82 ): >YD49_HUMAN
LKKTPTSQRGFRFESI

SEQ ID NO: 29602 - protein, 16 aa, Homo sapiens
  ( 68 )...( 83 ): >YD49_HUMAN
KKTPTSQRGFRFESIL

SEQ ID NO: 29603 - protein, 16 aa, Homo sapiens
  ( 117 )...( 132 ): >YD49_HUMAN
LGKIICKEMKGSKAIR

SEQ ID NO: 29604 - protein, 16 aa, Homo sapiens
  ( 118 )...( 133 ): >YD49_HUMAN
GKIICKEMKGSKAIRQ

SEQ ID NO: 29605 - protein, 16 aa, Homo sapiens
  ( 119 )...( 134 ): >YD49_HUMAN
KIICKEMKGSKAIRQT

SEQ ID NO: 29606 - protein, 16 aa, Homo sapiens
  ( 296 )...( 311 ): >YD49_HUMAN
GKAFRNKSYLSVHQKT

SEQ ID NO: 29607 - protein, 16 aa, Homo sapiens
  ( 436 )...( 451 ): >YD49_HUMAN
GKAFMRSSSLIIHQRI

SEQ ID NO: 29608 - protein, 16 aa, Homo sapiens
  ( 519 )...( 534 ): >YD49_HUMAN
CGKSFRTKSYLIVHQR

SEQ ID NO: 29609 - protein, 16 aa, Homo sapiens
  ( 520 )...( 535 ): >YD49_HUMAN
GKSFRTKSYLIVHQRT

SEQ ID NO: 29610 - protein, 16 aa, Homo sapiens
  ( 632 )...( 647 ): >YD49_HUMAN
GKAFRRGSYLTVHWRT

SEQ ID NO: 29611 - protein, 16 aa, Homo sapiens
  ( 107 )...( 122 ): >YE73_HUMAN
QKVILRRYKKCGCENL

SEQ ID NO: 29612 - protein, 16 aa, Homo sapiens
  ( 108 )...( 123 ): >YE73_HUMAN
KVILRRYKKCGCENLQ

SEQ ID NO: 29613 - protein, 16 aa, Homo sapiens
  ( 109 )...( 124 ): >YE73_HUMAN
VILRRYKKCGCENLQL

SEQ ID NO: 29614 - protein, 16 aa, Homo sapiens
  ( 227 )...( 242 ): >YE73_HUMAN
LSTHKRIHTGKKPYKC

SEQ ID NO: 29615 - protein, 15 aa, Homo sapiens
  ( 560 )...( 575 ): >YE73_HUMAN
IAKISKYKRNCAGEK

SEQ ID NO: 29616 - protein, 16 aa, Homo sapiens
  ( 62 )...( 77 ): >YF59_HUMAN
RKEPGMVVREGTRRYC

SEQ ID NO: 29617 - protein, 16 aa, Homo sapiens
  ( 173 )...( 188 ): >YF59_HUMAN
ECKECRKTFIRRSTLS

SEQ ID NO: 29618 - protein, 16 aa, Homo sapiens
  ( 174 )...( 189 ): >YF59_HUMAN
CKECRKTFIRRSTLSQ

SEQ ID NO: 29619 - protein, 16 aa, Homo sapiens
  ( 202 )...( 217 ): >YF59_HUMAN
CKECGQAFRQRAHLIR

SEQ ID NO: 29620 - protein, 16 aa, Homo sapiens
  ( 259 )...( 274 ): >YF59_HUMAN
KECGKAFRVHQQLARH

SEQ ID NO: 29621 - protein, 16 aa, Homo sapiens
  ( 289 )...( 304 ): >YF59_HUMAN
CGKTFRQCTHLTRHQR

SEQ ID NO: 29622 - protein, 16 aa, Homo sapiens
  ( 370 )...( 385 ): >YF59_HUMAN
CKECGKTFRLRQQLVR

SEQ ID NO: 29623 - protein, 16 aa, Homo sapiens
  ( 454 )...( 469 ): >YF59_HUMAN
CKECRKPFRLLSQLTQ

SEQ ID NO: 29624 - protein, 16 aa, Homo sapiens
  ( 269 )...( 284 ): >YJ56_HUMAN
HKGSLVQHQRVHTGKR

SEQ ID NO: 29625 - protein, 16 aa, Homo sapiens
  ( 270 )...( 285 ): >YJ56_HUMAN
KGSLVQHQRVHTGKRP

SEQ ID NO: 29626 - protein, 16 aa, Homo sapiens
  ( 348 )...( 363 ): >YJ56_HUMAN
GKCFTQKGNLIQHQRG

SEQ ID NO: 29627 - protein, 16 aa, Homo sapiens
  ( 431 )...( 446 ): >YJ56_HUMAN
CGKSFSRKGNLIQHQR

SEQ ID NO: 29628 - protein, 16 aa, Homo sapiens
  ( 432 )...( 447 ): >YJ56_HUMAN
GKSFSRKGNLIQHQRS

SEQ ID NO: 29629 - protein, 16 aa, Homo sapiens
  ( 521 )...( 536 ): >YJ56_HUMAN
QSCSLLRHRRVHTGER

SEQ ID NO: 29630 - protein, 16 aa, Homo sapiens
  ( 522 )...( 537 ): >YJ56_HUMAN
SCSLLRHRRVHTGERP

SEQ ID NO: 29631 - protein, 16 aa, Homo sapiens
  ( 168 )...( 183 ): >Z11A_HUMAN
GNNFRRKLCLSHLQKG

SEQ ID NO: 29632 - protein, 16 aa, Homo sapiens
  ( 171 )...( 186 ): >Z11A_HUMAN
FRRKLCLSHLQKGDKG

SEQ ID NO: 29633 - protein, 16 aa, Homo sapiens
  ( 172 )...( 187 ): >Z11A_HUMAN
RRKLCLSHLQKGDKGE

SEQ ID NO: 29634 - protein, 16 aa, Homo sapiens
  ( 232 )...( 247 ): >Z11B_HUMAN
GNNFRRKLCLSQLQKG

SEQ ID NO: 29635 - protein, 16 aa, Homo sapiens
  ( 235 )...( 250 ): >Z11B_HUMAN
FRRKLCLSQLQKGDKG

SEQ ID NO: 29636 - protein, 16 aa, Homo sapiens
  ( 236 )...( 251 ): >Z11B_HUMAN
RRKLCLSQLQKGDKGE

SEQ ID NO: 29637 - protein, 16 aa, Homo sapiens
  ( 237 )...( 252 ): >Z11B_HUMAN
RKLCLSQLQKGDKGEK

SEQ ID NO: 29638 - protein, 16 aa, Homo sapiens
  ( 436 )...( 451 ): >Z145_HUMAN
LCGKRFLDSLRLRMHL

SEQ ID NO: 29639 - protein, 16 aa, Homo sapiens
  ( 437 )...( 452 ): >Z145_HUMAN
CGKRFLDSLRLRMHLL

SEQ ID NO: 29640 - protein, 16 aa, Homo sapiens
  ( 438 )...( 453 ): >Z145_HUMAN
GKRFLDSLRLRMHLLA

SEQ ID NO: 29641 - protein, 16 aa, Homo sapiens
  ( 445 )...( 460 ): >Z145_HUMAN
LRLRMHLLAHSAGAKA

SEQ ID NO: 29642 - protein, 16 aa, Homo sapiens
  ( 282 )...( 297 ): >Z148_HUMAN
DKKLNRCAIKGGLLTS

SEQ ID NO: 29643 - protein, 16 aa, Homo sapiens
  ( 283 )...( 298 ): >Z148_HUMAN
KKLNRCAIKGGLLTSE

SEQ ID NO: 29644 - protein, 16 aa, Homo sapiens
  ( 311 )...( 326 ): >Z148_HUMAN
SLPKKKRQKTEKKSSG

SEQ ID NO: 29645 - protein, 16 aa, Homo sapiens
  ( 312 )...( 327 ): >Z148_HUMAN
LPKKKRQKTEKKSSGM

SEQ ID NO: 29646 - protein, 16 aa, Homo sapiens
  ( 385 )...( 400 ): >Z148_HUMAN
IHPPKLVLKKINSKRS

SEQ ID NO: 29647 - protein, 16 aa, Homo sapiens
  ( 386 )...( 401 ): >Z148_HUMAN
HPPKLVLKKINSKRSL

SEQ ID NO: 29648 - protein, 16 aa, Homo sapiens
  ( 387 )...( 402 ): >Z148_HUMAN
PPKLVLKKINSKRSLK

SEQ ID NO: 29649 - protein, 16 aa, Homo sapiens
  ( 388 )...( 403 ): >Z148_HUMAN
PKLVLKKINSKRSLKQ

SEQ ID NO: 29650 - protein, 16 aa, Homo sapiens
  ( 389 )...( 404 ): >Z148_HUMAN
KLVLKKINSKRSLKQP

SEQ ID NO: 29651 - protein, 16 aa, Homo sapiens
  ( 390 )...( 405 ): >Z148_HUMAN
LVLKKINSKRSLKQPL

SEQ ID NO: 29652 - protein, 16 aa, Homo sapiens
  ( 391 )...( 406 ): >Z148_HUMAN
VLKKINSKRSLKQPLE

SEQ ID NO: 29653 - protein, 16 aa, Homo sapiens
  ( 95 )...( 110 ): >Z161_HUMAN
CHTGIKLVSRPKKTPT

SEQ ID NO: 29654 - protein, 16 aa, Homo sapiens
  ( 97 )...( 112 ): >Z161_HUMAN
TGIKLVSRPKKTPTTV

SEQ ID NO: 29655 - protein, 16 aa, Homo sapiens
  ( 98 )...( 113 ): >Z161_HUMAN
GIKLVSRPKKTPTTVV

SEQ ID NO: 29656 - protein, 16 aa, Homo sapiens
  ( 99 )...( 114 ): >Z161_HUMAN
IKLVSRPKKTPTTVVP

SEQ ID NO: 29657 - protein, 16 aa, Homo sapiens
  ( 100 )...( 115 ): >Z161_HUMAN
KLVSRPKKTPTTVVPL

SEQ ID NO: 29658 - protein, 16 aa, Homo sapiens
  ( 157 )...( 172 ): >Z161_HUMAN
MPVTQSVKKPSKPVKK

SEQ ID NO: 29659 - protein, 16 aa, Homo sapiens
  ( 158 )...( 173 ): >Z161_HUMAN
PVTQSVKKPSKPVKKN

SEQ ID NO: 29660 - protein, 16 aa, Homo sapiens
  ( 159 )...( 174 ): >Z161_HUMAN
VTQSVKKPSKPVKKNH

SEQ ID NO: 29661 - protein, 16 aa, Homo sapiens
  ( 160 )...( 175 ): >Z161_HUMAN
TQSVKKPSKPVKKNHA

SEQ ID NO: 29662 - protein, 16 aa, Homo sapiens
  ( 267 )...( 282 ): >Z161_HUMAN
TAAFATKDRLRTHMVR

SEQ ID NO: 29663 - protein, 16 aa, Homo sapiens
  ( 268 )...( 283 ): >Z161_HUMAN
AAFATKDRLRTHMVRH

SEQ ID NO: 29664 - protein, 16 aa, Homo sapiens
  ( 275 )...( 290 ): >Z161_HUMAN
RLRTHMVRHEGKVSCN

SEQ ID NO: 29665 - protein, 16 aa, Homo sapiens
  ( 153 )...( 168 ): >Z189_HUMAN
CGKGFVRKAHFIQHQR

SEQ ID NO: 29666 - protein, 16 aa, Homo sapiens
  ( 154 )...( 169 ): >Z189_HUMAN
GKGFVRKAHFIQHQRV

SEQ ID NO: 29667 - protein, 16 aa, Homo sapiens
  ( 378 )...( 393 ): >Z189_HUMAN
GKSFSQLCNLTRHQRI

SEQ ID NO: 29668 - protein, 16 aa, Homo sapiens
  ( 406 )...( 421 ): >Z189_HUMAN
GKAFSRSSGLIQHQRI

SEQ ID NO: 29669 - protein, 16 aa, Homo sapiens
  ( 546 )...( 561 ): >Z189_HUMAN
GKAFSRNSGLIQHQRI

SEQ ID NO: 29670 - protein, 16 aa, Homo sapiens
  ( 332 )...( 347 ): >Z198_HUMAN
ANCKKPLQKGQTAYQR

SEQ ID NO: 29671 - protein, 16 aa, Homo sapiens
  ( 334 )...( 349 ): >Z198_HUMAN
CKKPLQKGQTAYQRKG

SEQ ID NO: 29672 - protein, 16 aa, Homo sapiens
  ( 335 )...( 350 ): >Z198_HUMAN
KKPLQKGQTAYQRKGS

SEQ ID NO: 29673 - protein, 16 aa, Homo sapiens
  ( 336 )...( 351 ): >Z198_HUMAN
KPLQKGQTAYQRKGSA

SEQ ID NO: 29674 - protein, 16 aa, Homo sapiens
  ( 420 )...( 435 ): >Z198_HUMAN
LNKSRCTICGKLTEIR

SEQ ID NO: 29675 - protein, 16 aa, Homo sapiens
  ( 707 )...( 722 ): >Z198_HUMAN
GCKLLYKQDFARRLGL

SEQ ID NO: 29676 - protein, 16 aa, Homo sapiens
  ( 710 )...( 725 ): >Z198_HUMAN
LLYKQDFARRLGLRCV

SEQ ID NO: 29677 - protein, 16 aa, Homo sapiens
  ( 711 )...( 726 ): >Z198_HUMAN
LYKQDFARRLGLRCVT

SEQ ID NO: 29678 - protein, 16 aa, Homo sapiens
  ( 770 )...( 785 ): >Z198_HUMAN
CCKSQGTLKERVQWRG

SEQ ID NO: 29679 - protein, 16 aa, Homo sapiens
  ( 846 )...( 861 ): >Z198_HUMAN
KNKAVLCKPLTMTKAT

SEQ ID NO: 29680 - protein, 16 aa, Homo sapiens
  ( 1039 )...( 1054 ): >Z198_HUMAN
PRSKKKGAKRKAVSGY

SEQ ID NO: 29681 - protein, 16 aa, Homo sapiens
  ( 1040 )...( 1055 ): >Z198_HUMAN
RSKKKGAKRKAVSGYQ

SEQ ID NO: 29682 - protein, 16 aa, Homo sapiens
  ( 1041 )...( 1056 ): >Z198_HUMAN
SKKKGAKRKAVSGYQS

SEQ ID NO: 29683 - protein, 16 aa, Homo sapiens
  ( 1042 )...( 1057 ): >Z198_HUMAN
KKKGAKRKAVSGYQSH

SEQ ID NO: 29684 - protein, 16 aa, Homo sapiens
  ( 1043 )...( 1058 ): >Z198_HUMAN
KKGAKRKAVSGYQSHD

SEQ ID NO: 29685 - protein, 16 aa, Homo sapiens
  ( 66 )...( 81 ): >Z211_HUMAN
GKACTRRCNLIQHQKV

SEQ ID NO: 29686 - protein, 16 aa, Homo sapiens
  ( 67 )...( 82 ): >Z211_HUMAN
KACTRRCNLIQHQKVH

SEQ ID NO: 29687 - protein, 16 aa, Homo sapiens
  ( 323 )...( 338 ): >Z211_HUMAN
QSSSLIQHRRVHTGKR

SEQ ID NO: 29688 - protein, 16 aa, Homo sapiens
  ( 324 )...( 339 ): >Z211_HUMAN
SSSLIQHRRVHTGKRP

SEQ ID NO: 29689 - protein, 16 aa, Homo sapiens
  ( 143 )...( 158 ): >Z212_HUMAN
SSRTVGCPKQKSHRQV

SEQ ID NO: 29690 - protein, 16 aa, Homo sapiens
  ( 144 )...( 159 ): >Z212_HUMAN
SRTVGCPKQKSHRQVQ

SEQ ID NO: 29691 - protein, 16 aa, Homo sapiens
  ( 145 )...( 160 ): >Z212_HUMAN
RTVGCPKQKSHRQVQL

SEQ ID NO: 29692 - protein, 16 aa, Homo sapiens
  ( 220 )...( 235 ): >Z212_HUMAN
RLKPQTKKAKLHQCDV

SEQ ID NO: 29693 - protein, 16 aa, Homo sapiens
  ( 158 )...( 173 ): >Z214_HUMAN
GSHGFQGGRYRLGISR

SEQ ID NO: 29694 - protein, 16 aa, Homo sapiens
  ( 159 )...( 174 ): >Z214_HUMAN
SHGFQGGRYRLGISRK

SEQ ID NO: 29695 - protein, 16 aa, Homo sapiens
  ( 160 )...( 175 ): >Z214_HUMAN
HGFQGGRYRLGISRKN

SEQ ID NO: 29696 - protein, 16 aa, Homo sapiens
  ( 161 )...( 176 ): >Z214_HUMAN
GFQGGRYRLGISRKNL

SEQ ID NO: 29697 - protein, 16 aa, Homo sapiens
  ( 162 )...( 177 ): >Z214_HUMAN
FQGGRYRLGISRKNLS

SEQ ID NO: 29698 - protein, 16 aa, Homo sapiens
  ( 163 )...( 178 ): >Z214_HUMAN
QGGRYRLGISRKNLSM

SEQ ID NO: 29699 - protein, 16 aa, Homo sapiens
  ( 164 )...( 179 ): >Z214_HUMAN
GGRYRLGISRKNLSME

SEQ ID NO: 29700 - protein, 16 aa, Homo sapiens
  ( 165 )...( 180 ): >Z214_HUMAN
GRYRLGISRKNLSMEK

SEQ ID NO: 29701 - protein, 16 aa, Homo sapiens
  ( 168 )...( 183 ): >Z214_HUMAN
RLGISRKNLSMEKEQK

SEQ ID NO: 29702 - protein, 16 aa, Homo sapiens
  ( 419 )...( 434 ): >Z214_HUMAN
CGKGFTQRSNLQIHQR

SEQ ID NO: 29703 - protein, 16 aa, Homo sapiens
  ( 420 )...( 435 ): >Z214_HUMAN
GKGFTQRSNLQIHQRV

SEQ ID NO: 29704 - protein, 16 aa, Homo sapiens
  ( 568 )...( 583 ): >Z214_HUMAN
ALRIHQRVHAGEKPYK

SEQ ID NO: 29705 - protein, 16 aa, Homo sapiens
  ( 4 )...( 19 ): >Z215_HUMAN
LSKLMAISKPRNLSLR

SEQ ID NO: 29706 - protein, 16 aa, Homo sapiens
  ( 5 )...( 20 ): >Z215_HUMAN
SKLMAISKPRNLSLRE

SEQ ID NO: 29707 - protein, 16 aa, Homo sapiens
  ( 6 )...( 21 ): >Z215_HUMAN
KLMAISKPRNLSLREQ

SEQ ID NO: 29708 - protein, 16 aa, Homo sapiens
  ( 141 )...( 156 ): >Z215_HUMAN
ALQMGSIKEKMKAGSR

SEQ ID NO: 29709 - protein, 16 aa, Homo sapiens
  ( 144 )...( 159 ): >Z215_HUMAN
MGSIKEKMKAGSRTGK

SEQ ID NO: 29710 - protein, 16 aa, Homo sapiens
  ( 146 )...( 161 ): >Z215_HUMAN
SIKEKMKAGSRTGKPQ

SEQ ID NO: 29711 - protein, 16 aa, Homo sapiens
  ( 174 )...( 189 ): >Z217_HUMAN
HMRTHNGKSGARSKLQ

SEQ ID NO: 29712 - protein, 16 aa, Homo sapiens
  ( 175 )...( 190 ): >Z217_HUMAN
MRTHNGKSGARSKLQQ

SEQ ID NO: 29713 - protein, 16 aa, Homo sapiens
  ( 176 )...( 191 ): >Z217_HUMAN
RTHNGKSGARSKLQQG

SEQ ID NO: 29714 - protein, 16 aa, Homo sapiens
  ( 389 )...( 404 ): >Z217_HUMAN
QLVLHSRVHKKDRRAG

SEQ ID NO: 29715 - protein, 16 aa, Homo sapiens
  ( 390 )...( 405 ): >Z217_HUMAN
LVLHSRVHKKDRRAGA

SEQ ID NO: 29716 - protein, 16 aa, Homo sapiens
  ( 391 )...( 406 ): >Z217_HUMAN
VLHSRVHKKDRRAGAE

SEQ ID NO: 29717 - protein, 16 aa, Homo sapiens
  ( 394 )...( 409 ): >Z217_HUMAN
SRVHKKDRRAGAESPT

SEQ ID NO: 29718 - protein, 16 aa, Homo sapiens
  ( 395 )...( 410 ): >Z217_HUMAN
RVHKKDRRAGAESPTM

SEQ ID NO: 29719 - protein, 16 aa, Homo sapiens
  ( 627 )...( 642 ): >Z217_HUMAN
KKRSAVETQANNLICR

SEQ ID NO: 29720 - protein, 16 aa, Homo sapiens
  ( 744 )...( 759 ): >Z217_HUMAN
RNKSLLRSRRTGCPPA

SEQ ID NO: 29721 - protein, 16 aa, Homo sapiens
  ( 746 )...( 761 ): >Z217_HUMAN
KSLLRSRRTGCPPALL

SEQ ID NO: 29722 - protein, 16 aa, Homo sapiens
  ( 748 )...( 763 ): >Z217_HUMAN
LLRSRRTGCPPALLGK

SEQ ID NO: 29723 - protein, 16 aa, Homo sapiens
  ( 853 )...( 868 ): >Z217_HUMAN
KTKRPETKLKPLPVAP

SEQ ID NO: 29724 - protein, 16 aa, Homo sapiens
  ( 855 )...( 870 ): >Z217_HUMAN
KRPETKLKPLPVAPSQ

SEQ ID NO: 29725 - protein, 16 aa, Homo sapiens
  ( 90 )...( 105 ): >Z219_HUMAN
CGHRAAQRALLRSHLR

SEQ ID NO: 29726 - protein, 16 aa, Homo sapiens
  ( 91 )...( 106 ): >Z219_HUMAN
GHRAAQRALLRSHLRT

SEQ ID NO: 29727 - protein, 16 aa, Homo sapiens
  ( 94 )...( 109 ): >Z219_HUMAN
AAQRALLRSHLRTHQP

SEQ ID NO: 29728 - protein, 16 aa, Homo sapiens
  ( 125 )...( 140 ): >Z219_HUMAN
ERALLREARLGRARSS

SEQ ID NO: 29729 - protein, 16 aa, Homo sapiens
  ( 126 )...( 141 ): >Z219_HUMAN
RALLREARLGRARSSG

SEQ ID NO: 29730 - protein, 16 aa, Homo sapiens
  ( 127 )...( 142 ): >Z219_HUMAN
ALLREARLGRARSSGG

SEQ ID NO: 29731 - protein, 16 aa, Homo sapiens
  ( 128 )...( 143 ): >Z219_HUMAN
LLREARLGRARSSGGM

SEQ ID NO: 29732 - protein, 16 aa, Homo sapiens
  ( 129 )...( 144 ): >Z219_HUMAN
LREARLGRARSSGGMQ

SEQ ID NO: 29733 - protein, 16 aa, Homo sapiens
  ( 130 )...( 145 ): >Z219_HUMAN
REARLGRARSSGGMQA

SEQ ID NO: 29734 - protein, 16 aa, Homo sapiens
  ( 317 )...( 332 ): >Z219_HUMAN
LKNHMKVHASKLGPLR

SEQ ID NO: 29735 - protein, 16 aa, Homo sapiens
  ( 318 )...( 333 ): >Z219_HUMAN
KNHMKVHASKLGPLRA

SEQ ID NO: 29736 - protein, 16 aa, Homo sapiens
  ( 504 )...( 519 ): >Z219_HUMAN
GKSFRSAHHLKVHLRV

SEQ ID NO: 29737 - protein, 16 aa, Homo sapiens
  ( 602 )...( 617 ): >Z219_HUMAN
GPGSRRKPASPGRTLR

SEQ ID NO: 29738 - protein, 16 aa, Homo sapiens
  ( 603 )...( 618 ): >Z219_HUMAN
PGSRRKPASPGRTLRN

SEQ ID NO: 29739 - protein, 16 aa, Homo sapiens
  ( 604 )...( 619 ): >Z219_HUMAN
GSRRKPASPGRTLRNG

SEQ ID NO: 29740 - protein, 16 aa, Homo sapiens
  ( 607 )...( 622 ): >Z219_HUMAN
RKPASPGRTLRNGRGG

SEQ ID NO: 29741 - protein, 16 aa, Homo sapiens
  ( 660 )...( 675 ): >Z219_HUMAN
LMALHLQVHHSRRARG

SEQ ID NO: 29742 - protein, 16 aa, Homo sapiens
  ( 245 )...( 260 ): >Z221_HUMAN
QRVHTGEKPFKRGQCG

SEQ ID NO: 29743 - protein, 16 aa, Homo sapiens
  ( 246 )...( 261 ): >Z221_HUMAN
RVHTGEKPFKRGQCGK

SEQ ID NO: 29744 - protein, 16 aa, Homo sapiens
  ( 212 )...( 227 ): >Z222_HUMAN
CRSALKVHCKLHMREK

SEQ ID NO: 29745 - protein, 16 aa, Homo sapiens
  ( 406 )...( 421 ): >Z223_HUMAN
GKSFRQASSILNHKRL

SEQ ID NO: 29746 - protein, 16 aa, Homo sapiens
  ( 190 )...( 205 ): >Z224_HUMAN
ALRIHQRVHMGEKCYK

SEQ ID NO: 29747 - protein, 16 aa, Homo sapiens
  ( 238 )...( 253 ): >Z224_HUMAN
GKGFSRRSALNVHHKL

SEQ ID NO: 29748 - protein, 16 aa, Homo sapiens
  ( 378 )...( 393 ): >Z224_HUMAN
GKSFRWASCLLKHQRV

SEQ ID NO: 29749 - protein, 16 aa, Homo sapiens
  ( 426 )...( 441 ): >Z224_HUMAN
KPYKCVECGKGYKRRL

SEQ ID NO: 29750 - protein, 16 aa, Homo sapiens
  ( 551 )...( 566 ): >Z224_HUMAN
WASCLLKHQRLRSGEK

SEQ ID NO: 29751 - protein, 16 aa, Homo sapiens
  ( 552 )...( 567 ): >Z224_HUMAN
ASCLLKHQRLRSGEKP

SEQ ID NO: 29752 - protein, 16 aa, Homo sapiens
  ( 602 )...( 617 ): >Z224_HUMAN
GKGFSWSSTRLTHQRR

SEQ ID NO: 29753 - protein, 16 aa, Homo sapiens
  ( 237 )...( 252 ): >Z225_HUMAN
CGKGFSRRSGLYVHRK

SEQ ID NO: 29754 - protein, 16 aa, Homo sapiens
  ( 238 )...( 253 ): >Z225_HUMAN
GKGFSRRSGLYVHRKL

SEQ ID NO: 29755 - protein, 16 aa, Homo sapiens
  ( 240 )...( 255 ): >Z225_HUMAN
GFSRRSGLYVHRKLHT

SEQ ID NO: 29756 - protein, 16 aa, Homo sapiens
  ( 241 )...( 256 ): >Z225_HUMAN
FSRRSGLYVHRKLHTG

SEQ ID NO: 29757 - protein, 16 aa, Homo sapiens
  ( 242 )...( 257 ): >Z225_HUMAN
SRRSGLYVHRKLHTGV

SEQ ID NO: 29758 - protein, 16 aa, Homo sapiens
  ( 243 )...( 258 ): >Z225_HUMAN
RRSGLYVHRKLHTGVK

SEQ ID NO: 29759 - protein, 16 aa, Homo sapiens
  ( 244 )...( 259 ): >Z225_HUMAN
RSGLYVHRKLHTGVKP

SEQ ID NO: 29760 - protein, 16 aa, Homo sapiens
  ( 378 )...( 393 ): >Z225_HUMAN
GKSFRWASGLSRHVRV

SEQ ID NO: 29761 - protein, 16 aa, Homo sapiens
  ( 70 )...( 85 ): >Z226_HUMAN
TATRRQGNLGEKNQSK

SEQ ID NO: 29762 - protein, 16 aa, Homo sapiens
  ( 71 )...( 86 ): >Z226_HUMAN
ATRRQGNLGEKNQSKL

SEQ ID NO: 29763 - protein, 16 aa, Homo sapiens
  ( 72 )...( 87 ): >Z226_HUMAN
TRRQGNLGEKNQSKLI

SEQ ID NO: 29764 - protein, 16 aa, Homo sapiens
  ( 73 )...( 88 ): >Z226_HUMAN
RRQGNLGEKNQSKLIT

SEQ ID NO: 29765 - protein, 16 aa, Homo sapiens
  ( 188 )...( 203 ): >Z226_HUMAN
QQISIKNKLCQCKKGV

SEQ ID NO: 29766 - protein, 16 aa, Homo sapiens
  ( 593 )...( 608 ): >Z226_HUMAN
GKGFSRRADLKIHCRI

SEQ ID NO: 29767 - protein, 16 aa, Homo sapiens
  ( 595 )...( 610 ): >Z226_HUMAN
GFSRRADLKIHCRIHT

SEQ ID NO: 29768 - protein, 16 aa, Homo sapiens
  ( 596 )...( 611 ): >Z226_HUMAN
FSRRADLKIHCRIHTG

SEQ ID NO: 29769 - protein, 16 aa, Homo sapiens
  ( 598 )...( 613 ): >Z226_HUMAN
RRADLKIHCRIHTGEK

SEQ ID NO: 29770 - protein, 16 aa, Homo sapiens
  ( 621 )...( 636 ): >Z226_HUMAN
GKVFRQASNLLAHQRV

SEQ ID NO: 29771 - protein, 16 aa, Homo sapiens
  ( 775 )...( 790 ): >Z226_HUMAN
RIHVGDKSYKSNRGGK

SEQ ID NO: 29772 - protein, 16 aa, Homo sapiens
  ( 778 )...( 793 ): >Z226_HUMAN
VGDKSYKSNRGGKNIR

SEQ ID NO: 29773 - protein, 16 aa, Homo sapiens
  ( 781 )...( 796 ): >Z226_HUMAN
KSYKSNRGGKNIREST

SEQ ID NO: 29774 - protein, 16 aa, Homo sapiens
  ( 782 )...( 797 ): >Z226_HUMAN
SYKSNRGGKNIRESTQ

SEQ ID NO: 29775 - protein, 16 aa, Homo sapiens
  ( 787 )...( 802 ): >Z226_HUMAN
RGGKNIRESTQEKKSI

SEQ ID NO: 29776 - protein, 16 aa, Homo sapiens
  ( 531 )...( 546 ): >Z228_HUMAN
GKGFNHRSVLNVHQRV

SEQ ID NO: 29777 - protein, 16 aa, Homo sapiens
  ( 587 )...( 602 ): >Z228_HUMAN
GKGFSRNSYLQGHQRV

SEQ ID NO: 29778 - protein, 16 aa, Homo sapiens
  ( 727 )...( 742 ): >Z228_HUMAN
GKGFSQRAYLQGHQRV

SEQ ID NO: 29779 - protein, 16 aa, Homo sapiens
  ( 731 )...( 746 ): >Z228_HUMAN
SQRAYLQGHQRVHTRV

SEQ ID NO: 29780 - protein, 16 aa, Homo sapiens
  ( 736 )...( 751 ): >Z228_HUMAN
LQGHQRVHTRVKPYKC

SEQ ID NO: 29781 - protein, 16 aa, Homo sapiens
  ( 755 )...( 770 ): >Z228_HUMAN
GKGFSQSSRLEAHRRV

SEQ ID NO: 29782 - protein, 16 aa, Homo sapiens
  ( 762 )...( 777 ): >Z228_HUMAN
SRLEAHRRVHTGGKPY

SEQ ID NO: 29783 - protein, 16 aa, Homo sapiens
  ( 763 )...( 778 ): >Z228_HUMAN
RLEAHRRVHTGGKPYK

SEQ ID NO: 29784 - protein, 16 aa, Homo sapiens
  ( 839 )...( 854 ): >Z228_HUMAN
GKGFSQRSNLQAHQRV

SEQ ID NO: 29785 - protein, 16 aa, Homo sapiens
  ( 867 )...( 882 ): >Z228_HUMAN
GKGFRWSSGLLIHQRV

SEQ ID NO: 29786 - protein, 16 aa, Homo sapiens
  ( 868 )...( 883 ): >Z228_HUMAN
KGFRWSSGLLIHQRVH

SEQ ID NO: 29787 - protein, 16 aa, Homo sapiens
  ( 313 )...( 328 ): >Z229_HUMAN
RVPTGEKSVKSLERGR

SEQ ID NO: 29788 - protein, 16 aa, Homo sapiens
  ( 316 )...( 331 ): >Z229_HUMAN
TGEKSVKSLERGRGVR

SEQ ID NO: 29789 - protein, 16 aa, Homo sapiens
  ( 317 )...( 332 ): >Z229_HUMAN
GEKSVKSLERGRGVRQ

SEQ ID NO: 29790 - protein, 16 aa, Homo sapiens
  ( 318 )...( 333 ): >Z229_HUMAN
EKSVKSLERGRGVRQN

SEQ ID NO: 29791 - protein, 16 aa, Homo sapiens
  ( 319 )...( 334 ): >Z229_HUMAN
KSVKSLERGRGVRQNT

SEQ ID NO: 29792 - protein, 16 aa, Homo sapiens
  ( 320 )...( 335 ): >Z229_HUMAN
SVKSLERGRGVRQNTH

SEQ ID NO: 29793 - protein, 16 aa, Homo sapiens
  ( 321 )...( 336 ): >Z229_HUMAN
VKSLERGRGVRQNTHI

SEQ ID NO: 29794 - protein, 16 aa, Homo sapiens
  ( 322 )...( 337 ): >Z229_HUMAN
KSLERGRGVRQNTHIR

SEQ ID NO: 29795 - protein, 16 aa, Homo sapiens
  ( 323 )...( 338 ): >Z229_HUMAN
SLERGRGVRQNTHIRN

SEQ ID NO: 29796 - protein, 16 aa, Homo sapiens
  ( 353 )...( 368 ): >Z229_HUMAN
VCGKGFRYKSVLLIHQ

SEQ ID NO: 29797 - protein, 16 aa, Homo sapiens
  ( 355 )...( 370 ): >Z229_HUMAN
GKGFRYKSVLLIHQGV

SEQ ID NO: 29798 - protein, 16 aa, Homo sapiens
  ( 363 )...( 378 ): >Z229_HUMAN
VLLIHQGVHTGRRPYK

SEQ ID NO: 29799 - protein, 16 aa, Homo sapiens
  ( 364 )...( 379 ): >Z229_HUMAN
LLIHQGVHTGRRPYKC

SEQ ID NO: 29800 - protein, 16 aa, Homo sapiens
  ( 383 )...( 398 ): >Z229_HUMAN
GKAFGRSSNLLVHQRV

SEQ ID NO: 29801 - protein, 16 aa, Homo sapiens
  ( 180 )...( 195 ): >Z230_HUMAN
ISALRIHQRVHLREKL

SEQ ID NO: 29802 - protein, 16 aa, Homo sapiens
  ( 230 )...( 245 ): >Z230_HUMAN
GKGFRCRAILQVHCKL

SEQ ID NO: 29803 - protein, 16 aa, Homo sapiens
  ( 231 )...( 246 ): >Z230_HUMAN
KGFRCRAILQVHCKLH

SEQ ID NO: 29804 - protein, 16 aa, Homo sapiens
  ( 338 )...( 353 ): >Z232_HUMAN
GKAFRWGAHLVQHQRI

SEQ ID NO: 29805 - protein, 16 aa, Homo sapiens
  ( 394 )...( 409 ): >Z232_HUMAN
GKAYGWCSELIRHRRV

SEQ ID NO: 29806 - protein, 16 aa, Homo sapiens
  ( 61 )...( 76 ): >Z234_HUMAN
KEKKLDIMKTATQRKG

SEQ ID NO: 29807 - protein, 16 aa, Homo sapiens
  ( 62 )...( 77 ): >Z234_HUMAN
EKKLDIMKTATQRKGK

SEQ ID NO: 29808 - protein, 16 aa, Homo sapiens
  ( 63 )...( 78 ): >Z234_HUMAN
KKLDIMKTATQRKGKS

SEQ ID NO: 29809 - protein, 16 aa, Homo sapiens
  ( 64 )...( 79 ): >Z234_HUMAN
KLDIMKTATQRKGKSA

SEQ ID NO: 29810 - protein, 16 aa, Homo sapiens
  ( 67 )...( 82 ): >Z234_HUMAN
IMKTATQRKGKSADKI

SEQ ID NO: 29811 - protein, 16 aa, Homo sapiens
  ( 68 )...( 83 ): >Z234_HUMAN
MKTATQRKGKSADKIQ

SEQ ID NO: 29812 - protein, 16 aa, Homo sapiens
  ( 69 )...( 84 ): >Z234_HUMAN
KTATQRKGKSADKIQS

SEQ ID NO: 29813 - protein, 16 aa, Homo sapiens
  ( 238 )...( 253 ): >Z234_HUMAN
GKGFSRRSTLTVHCKL

SEQ ID NO: 29814 - protein, 16 aa, Homo sapiens
  ( 239 )...( 254 ): >Z234_HUMAN
KGFSRRSTLTVHCKLH

SEQ ID NO: 29815 - protein, 16 aa, Homo sapiens
  ( 434 )...( 449 ): >Z234_HUMAN
GKAFRQSSYLKIHLKA

SEQ ID NO: 29816 - protein, 16 aa, Homo sapiens
  ( 490 )...( 505 ): >Z234_HUMAN
GKGFNRRADLKIHCRI

SEQ ID NO: 29817 - protein, 16 aa, Homo sapiens
  ( 495 )...( 510 ): >Z234_HUMAN
RRADLKIHCRIHTGEK

SEQ ID NO: 29818 - protein, 16 aa, Homo sapiens
  ( 99 )...( 114 ): >Z236_HUMAN
NKKFSRVASLKAHIML

SEQ ID NO: 29819 - protein, 16 aa, Homo sapiens
  ( 100 )...( 115 ): >Z236_HUMAN
KKFSRVASLKAHIMLH

SEQ ID NO: 29820 - protein, 16 aa, Homo sapiens
  ( 202 )...( 217 ): >Z236_HUMAN
CGKTFQKPSQLTRHIR

SEQ ID NO: 29821 - protein, 16 aa, Homo sapiens
  ( 203 )...( 218 ): >Z236_HUMAN
GKTFQKPSQLTRHIRI

SEQ ID NO: 29822 - protein, 16 aa, Homo sapiens
  ( 212 )...( 227 ): >Z236_HUMAN
LTRHIRIHTGERPFKC

SEQ ID NO: 29823 - protein, 16 aa, Homo sapiens
  ( 457 )...( 472 ): >Z236_HUMAN
KEKKMIKKKSPFLPGS

SEQ ID NO: 29824 - protein, 16 aa, Homo sapiens
  ( 458 )...( 473 ): >Z236_HUMAN
EKKMIKKKSPFLPGSI

SEQ ID NO: 29825 - protein, 16 aa, Homo sapiens
  ( 459 )...( 474 ): >Z236_HUMAN
KKMIKKKSPFLPGSIR

SEQ ID NO: 29826 - protein, 16 aa, Homo sapiens
  ( 460 )...( 475 ): >Z236_HUMAN
KMIKKKSPFLPGSIRE

SEQ ID NO: 29827 - protein, 16 aa, Homo sapiens
  ( 553 )...( 568 ): >Z236_HUMAN
LKVHIRLHTGVRPFAC

SEQ ID NO: 29828 - protein, 16 aa, Homo sapiens
  ( 571 )...( 586 ): >Z236_HUMAN
CDKKFRTSGHRKTHIA

SEQ ID NO: 29829 - protein, 16 aa, Homo sapiens
  ( 596 )...( 611 ): >Z236_HUMAN
KMRHQRKPAKVRVGKT

SEQ ID NO: 29830 - protein, 16 aa, Homo sapiens
  ( 598 )...( 613 ): >Z236_HUMAN
RHQRKPAKVRVGKTNV

SEQ ID NO: 29831 - protein, 16 aa, Homo sapiens
  ( 599 )...( 614 ): >Z236_HUMAN
HQRKPAKVRVGKTNVP

SEQ ID NO: 29832 - protein, 16 aa, Homo sapiens
  ( 600 )...( 615 ): >Z236_HUMAN
QRKPAKVRVGKTNVPV

SEQ ID NO: 29833 - protein, 16 aa, Homo sapiens
  ( 601 )...( 616 ): >Z236_HUMAN
RKPAKVRVGKTNVPVP

SEQ ID NO: 29834 - protein, 16 aa, Homo sapiens
  ( 747 )...( 762 ): >Z236_HUMAN
QKTFKTSLNCKKHMKT

SEQ ID NO: 29835 - protein, 16 aa, Homo sapiens
  ( 1235 )...( 1250 ): >Z236_HUMAN
KGSLKVHMRLHTGAKP

SEQ ID NO: 29836 - protein, 16 aa, Homo sapiens
  ( 1237 )...( 1252 ): >Z236_HUMAN
SLKVHMRLHTGAKPFK

SEQ ID NO: 29837 - protein, 16 aa, Homo sapiens
  ( 1279 )...( 1294 ): >Z236_HUMAN
KKARKPMTRSSSEGLQ

SEQ ID NO: 29838 - protein, 16 aa, Homo sapiens
  ( 1784 )...( 1799 ): >Z236_HUMAN
VMGFTQKSNMKLHMKR

SEQ ID NO: 29839 - protein, 16 aa, Homo sapiens
  ( 1785 )...( 1800 ): >Z236_HUMAN
MGFTQKSNMKLHMKRA

SEQ ID NO: 29840 - protein, 16 aa, Homo sapiens
  ( 177 )...( 192 ): >Z253_HUMAN
CGKAFKRSSTLTTHKK

SEQ ID NO: 29841 - protein, 16 aa, Homo sapiens
  ( 178 )...( 193 ): >Z253_HUMAN
GKAFKRSSTLTTHKKI

SEQ ID NO: 29842 - protein, 16 aa, Homo sapiens
  ( 179 )...( 194 ): >Z253_HUMAN
KAFKRSSTLTTHKKIH

SEQ ID NO: 29843 - protein, 16 aa, Homo sapiens
  ( 247 )...( 262 ): >Z253_HUMAN
KKIHIERKPYIVKNVT

SEQ ID NO: 29844 - protein, 16 aa, Homo sapiens
  ( 111 )...( 126 ): >Z254_HUMAN
RYGKYGHENLQLRKGC

SEQ ID NO: 29845 - protein, 16 aa, Homo sapiens
  ( 121 )...( 136 ): >Z254_HUMAN
QLRKGCKSVDEYKVNK

SEQ ID NO: 29846 - protein, 16 aa, Homo sapiens
  ( 183 )...( 198 ): >Z254_HUMAN
KCKKRVKLFCMLSHKT

SEQ ID NO: 29847 - protein, 16 aa, Homo sapiens
  ( 184 )...( 199 ): >Z254_HUMAN
CKKRVKLFCMLSHKTQ

SEQ ID NO: 29848 - protein, 16 aa, Homo sapiens
  ( 272 )...( 287 ): >Z254_HUMAN
GKAFNRSSTFTKHKVI

SEQ ID NO: 29849 - protein, 16 aa, Homo sapiens
  ( 300 )...( 315 ): >Z254_HUMAN
GKAFFWSSTLTKHKRI

SEQ ID NO: 29850 - protein, 16 aa, Homo sapiens
  ( 106 )...( 121 ): >Z255_HUMAN
ALRIHQRVHMGEKCYK

SEQ ID NO: 29851 - protein, 16 aa, Homo sapiens
  ( 154 )...( 169 ): >Z255_HUMAN
GKGFSRRSALNVHHKL

SEQ ID NO: 29852 - protein, 16 aa, Homo sapiens
  ( 294 )...( 309 ): >Z255_HUMAN
GKSFRWASCLLKHQRV

SEQ ID NO: 29853 - protein, 16 aa, Homo sapiens
  ( 342 )...( 357 ): >Z255_HUMAN
KPYKCVECGKGYKRRL

SEQ ID NO: 29854 - protein, 16 aa, Homo sapiens
  ( 518 )...( 533 ): >Z255_HUMAN
GKGFSWSSTRLTHQRR

SEQ ID NO: 29855 - protein, 16 aa, Homo sapiens
  ( 33 )...( 48 ): >Z256_HUMAN
QQAAHTRKKSNRTKSA

SEQ ID NO: 29856 - protein, 16 aa, Homo sapiens
  ( 34 )...( 49 ): >Z256_HUMAN
QAAHTRKKSNRTKSAV

SEQ ID NO: 29857 - protein, 16 aa, Homo sapiens
  ( 35 )...( 50 ): >Z256_HUMAN
AAHTRKKSNRTKSAVA

SEQ ID NO: 29858 - protein, 16 aa, Homo sapiens
  ( 36 )...( 51 ): >Z256_HUMAN
AHTRKKSNRTKSAVAF

SEQ ID NO: 29859 - protein, 16 aa, Homo sapiens
  ( 38 )...( 53 ): >Z256_HUMAN
TRKKSNRTKSAVAFHS

SEQ ID NO: 29860 - protein, 16 aa, Homo sapiens
  ( 39 )...( 54 ): >Z256_HUMAN
RKKSNRTKSAVAFHSV

SEQ ID NO: 29861 - protein, 16 aa, Homo sapiens
  ( 40 )...( 55 ): >Z256_HUMAN
KKSNRTKSAVAFHSVK

SEQ ID NO: 29862 - protein, 16 aa, Homo sapiens
  ( 119 )...( 134 ): >Z256_HUMAN
CGKSYRQSSSLITHRR

SEQ ID NO: 29863 - protein, 16 aa, Homo sapiens
  ( 120 )...( 135 ): >Z256_HUMAN
GKSYRQSSSLITHRRI

SEQ ID NO: 29864 - protein, 16 aa, Homo sapiens
  ( 232 )...( 247 ): >Z256_HUMAN
GKSFSQSCHLIKHRRL

SEQ ID NO: 29865 - protein, 16 aa, Homo sapiens
  ( 488 )...( 503 ): >Z264_HUMAN
CGKAFTRMSGLTRHKR

SEQ ID NO: 29866 - protein, 16 aa, Homo sapiens
  ( 489 )...( 504 ): >Z264_HUMAN
GKAFTRMSGLTRHKRI

SEQ ID NO: 29867 - protein, 16 aa, Homo sapiens
  ( 491 )...( 506 ): >Z264_HUMAN
AFTRMSGLTRHKRIHS

SEQ ID NO: 29868 - protein, 16 aa, Homo sapiens
  ( 492 )...( 507 ): >Z264_HUMAN
FTRMSGLTRHKRIHSG

SEQ ID NO: 29869 - protein, 16 aa, Homo sapiens
  ( 494 )...( 509 ): >Z264_HUMAN
RMSGLTRHKRIHSGEK

SEQ ID NO: 29870 - protein, 16 aa, Homo sapiens
  ( 192 )...( 207 ): >Z267_HUMAN
KTSVLFRQVSTLNSYR

SEQ ID NO: 29871 - protein, 16 aa, Homo sapiens
  ( 414 )...( 429 ): >Z267_HUMAN
GKAFRCSSYLTKHKRI

SEQ ID NO: 29872 - protein, 16 aa, Homo sapiens
  ( 417 )...( 432 ): >Z267_HUMAN
FRCSSYLTKHKRIHTG

SEQ ID NO: 29873 - protein, 16 aa, Homo sapiens
  ( 498 )...( 513 ): >Z267_HUMAN
GKVFSRSSCLTQHRKI

SEQ ID NO: 29874 - protein, 16 aa, Homo sapiens
  ( 39 )...( 54 ): >Z268_HUMAN
TPGLQPLPGTPRQKQK

SEQ ID NO: 29875 - protein, 16 aa, Homo sapiens
  ( 41 )...( 56 ): >Z268_HUMAN
GLQPLPGTPRQKQKSR

SEQ ID NO: 29876 - protein, 16 aa, Homo sapiens
  ( 47 )...( 62 ): >Z268_HUMAN
GTPRQKQKSRRIEKVL

SEQ ID NO: 29877 - protein, 16 aa, Homo sapiens
  ( 184 )...( 199 ): >Z268_HUMAN
FGKLCLLSTKYLSRQK

SEQ ID NO: 29878 - protein, 16 aa, Homo sapiens
  ( 185 )...( 200 ): >Z268_HUMAN
GKLCLLSTKYLSRQKP

SEQ ID NO: 29879 - protein, 16 aa, Homo sapiens
  ( 186 )...( 201 ): >Z268_HUMAN
KLCLLSTKYLSRQKPH

SEQ ID NO: 29880 - protein, 16 aa, Homo sapiens
  ( 187 )...( 202 ): >Z268_HUMAN
LCLLSTKYLSRQKPHK

SEQ ID NO: 29881 - protein, 16 aa, Homo sapiens
  ( 189 )...( 204 ): >Z268_HUMAN
LLSTKYLSRQKPHKCG

SEQ ID NO: 29882 - protein, 16 aa, Homo sapiens
  ( 193 )...( 208 ): >Z268_HUMAN
KYLSRQKPHKCGTHGK

SEQ ID NO: 29883 - protein, 16 aa, Homo sapiens
  ( 197 )...( 212 ): >Z268_HUMAN
RQKPHKCGTHGKSLKY

SEQ ID NO: 29884 - protein, 16 aa, Homo sapiens
  ( 505 )...( 520 ): >Z268_HUMAN
CGKAFRSKSYLIIHTR

SEQ ID NO: 29885 - protein, 16 aa, Homo sapiens
  ( 506 )...( 521 ): >Z268_HUMAN
GKAFRSKSYLIIHTRT

SEQ ID NO: 29886 - protein, 16 aa, Homo sapiens
  ( 589 )...( 604 ): >Z268_HUMAN
CGKAFGLKSQLIIHQR

SEQ ID NO: 29887 - protein, 16 aa, Homo sapiens
  ( 702 )...( 717 ): >Z268_HUMAN
GKAFRSKSYLIIHMRT

SEQ ID NO: 29888 - protein, 16 aa, Homo sapiens
  ( 841 )...( 856 ): >Z268_HUMAN
CEKSFSGKLRLLVHQR

SEQ ID NO: 29889 - protein, 16 aa, Homo sapiens
  ( 842 )...( 857 ): >Z268_HUMAN
EKSFSGKLRLLVHQRM

SEQ ID NO: 29890 - protein, 16 aa, Homo sapiens
  ( 846 )...( 861 ): >Z268_HUMAN
SGKLRLLVHQRMHTRE

SEQ ID NO: 29891 - protein, 16 aa, Homo sapiens
  ( 869 )...( 884 ): >Z268_HUMAN
CGKAFIRNSQLIVHQR

SEQ ID NO: 29892 - protein, 16 aa, Homo sapiens
  ( 870 )...( 885 ): >Z268_HUMAN
GKAFIRNSQLIVHQRT

SEQ ID NO: 29893 - protein, 16 aa, Homo sapiens
  ( 43 )...( 58 ): >Z271_HUMAN
ESSSLRMFSRILKAKN

SEQ ID NO: 29894 - protein, 16 aa, Homo sapiens
  ( 45 )...( 60 ): >Z271_HUMAN
SSLRMFSRILKAKNSV

SEQ ID NO: 29895 - protein, 16 aa, Homo sapiens
  ( 46 )...( 61 ): >Z271_HUMAN
SLRMFSRILKAKNSVN

SEQ ID NO: 29896 - protein, 16 aa, Homo sapiens
  ( 47 )...( 62 ): >Z271_HUMAN
LRMFSRILKAKNSVNL

SEQ ID NO: 29897 - protein, 16 aa, Homo sapiens
  ( 48 )...( 63 ): >Z271_HUMAN
RMFSRILKAKNSVNLG

SEQ ID NO: 29898 - protein, 16 aa, Homo sapiens
  ( 49 )...( 64 ): >Z271_HUMAN
MFSRILKAKNSVNLGI

SEQ ID NO: 29899 - protein, 16 aa, Homo sapiens
  ( 50 )...( 65 ): >Z271_HUMAN
FSRILKAKNSVNLGIN

SEQ ID NO: 29900 - protein, 16 aa, Homo sapiens
  ( 52 )...( 67 ): >Z271_HUMAN
RILKAKNSVNLGINEK

SEQ ID NO: 29901 - protein, 16 aa, Homo sapiens
  ( 7 )...( 22 ): >Z272_HUMAN
KECGKAFSIRKDLIRH

SEQ ID NO: 29902 - protein, 16 aa, Homo sapiens
  ( 38 )...( 53 ): >Z272_HUMAN
GKAFTRMSGLTRHQWI

SEQ ID NO: 29903 - protein, 16 aa, Homo sapiens
  ( 31 )...( 46 ): >Z273_HUMAN
GKAFNWSSTLTKHKRI

SEQ ID NO: 29904 - protein, 16 aa, Homo sapiens
  ( 85 )...( 100 ): >Z273_HUMAN
ECGKAFKRSTTLKHKR

SEQ ID NO: 29905 - protein, 16 aa, Homo sapiens
  ( 86 )...( 101 ): >Z273_HUMAN
CGKAFKRSTTLKHKRI

SEQ ID NO: 29906 - protein, 16 aa, Homo sapiens
  ( 170 )...( 185 ): >Z273_HUMAN
GKAFNWSSTLTKHKRI

SEQ ID NO: 29907 - protein, 16 aa, Homo sapiens
  ( 215 )...( 230 ): >Z275_HUMAN
CGKRFKKNAGLSQHLR

SEQ ID NO: 29908 - protein, 16 aa, Homo sapiens
  ( 216 )...( 231 ): >Z275_HUMAN
GKRFKKNAGLSQHLRV

SEQ ID NO: 29909 - protein, 16 aa, Homo sapiens
  ( 384 )...( 399 ): >Z275_HUMAN
GKAFRGPSDLIKHRRI

SEQ ID NO: 29910 - protein, 16 aa, Homo sapiens
  ( 388 )...( 403 ): >Z275_HUMAN
RGPSDLIKHRRIHSGL

SEQ ID NO: 29911 - protein, 16 aa, Homo sapiens
  ( 410 )...( 425 ): >Z275_HUMAN
KCGKAFRRSSGLSRHR

SEQ ID NO: 29912 - protein, 16 aa, Homo sapiens
  ( 416 )...( 431 ): >Z275_HUMAN
RRSSGLSRHRRIHSGA

SEQ ID NO: 29913 - protein, 16 aa, Homo sapiens
  ( 417 )...( 432 ): >Z275_HUMAN
RSSGLSRHRRIHSGAR

SEQ ID NO: 29914 - protein, 16 aa, Homo sapiens
  ( 418 )...( 433 ): >Z275_HUMAN
SSGLSRHRRIHSGARR

SEQ ID NO: 29915 - protein, 16 aa, Homo sapiens
  ( 419 )...( 434 ): >Z275_HUMAN
SGLSRHRRIHSGARRC

SEQ ID NO: 29916 - protein, 16 aa, Homo sapiens
  ( 420 )...( 435 ): >Z275_HUMAN
GLSRHRRIHSGARRCE

SEQ ID NO: 29917 - protein, 16 aa, Homo sapiens
  ( 436 )...( 451 ): >Z275_HUMAN
CSQCGRVFKRRSALQK

SEQ ID NO: 29918 - protein, 16 aa, Homo sapiens
  ( 219 )...( 234 ): >Z286_HUMAN
TLEKSLKQKSNLMKKQ

SEQ ID NO: 29919 - protein, 16 aa, Homo sapiens
  ( 6 )...( 21 ): >Z287_HUMAN
RSQILLRWKSDKAQSG

SEQ ID NO: 29920 - protein, 16 aa, Homo sapiens
  ( 54 )...( 69 ): >Z287_HUMAN
AGPRKALSQLRELCLK

SEQ ID NO: 29921 - protein, 16 aa, Homo sapiens
  ( 55 )...( 70 ): >Z287_HUMAN
GPRKALSQLRELCLKW

SEQ ID NO: 29922 - protein, 16 aa, Homo sapiens
  ( 271 )...( 286 ): >Z287_HUMAN
RRGKGGFWKIHTDERG

SEQ ID NO: 29923 - protein, 16 aa, Homo sapiens
  ( 347 )...( 362 ): >Z287_HUMAN
YGIVHRKILPGEKPYK

SEQ ID NO: 29924 - protein, 16 aa, Homo sapiens
  ( 646 )...( 661 ): >Z287_HUMAN
CGKAYRQGANLTQHQR

SEQ ID NO: 29925 - protein, 16 aa, Homo sapiens
  ( 647 )...( 662 ): >Z287_HUMAN
GKAYRQGANLTQHQRI

SEQ ID NO: 29926 - protein, 16 aa, Homo sapiens
  ( 106 )...( 121 ): >Z288_HUMAN
VTVRIHGSMLRAHRCV

SEQ ID NO: 29927 - protein, 16 aa, Homo sapiens
  ( 107 )...( 122 ): >Z288_HUMAN
TVRIHGSMLRAHRCVL

SEQ ID NO: 29928 - protein, 16 aa, Homo sapiens
  ( 108 )...( 123 ): >Z288_HUMAN
VRIHGSMLRAHRCVLA

SEQ ID NO: 29929 - protein, 16 aa, Homo sapiens
  ( 304 )...( 319 ): >Z288_HUMAN
TTPETTHCRKQPRPVR

SEQ ID NO: 29930 - protein, 16 aa, Homo sapiens
  ( 305 )...( 320 ): >Z288_HUMAN
TPETTHCRKQPRPVRI

SEQ ID NO: 29931 - protein, 16 aa, Homo sapiens
  ( 307 )...( 322 ): >Z288_HUMAN
ETTHCRKQPRPVRIQT

SEQ ID NO: 29932 - protein, 16 aa, Homo sapiens
  ( 308 )...( 323 ): >Z288_HUMAN
TTHCRKQPRPVRIQTL

SEQ ID NO: 29933 - protein, 16 aa, Homo sapiens
  ( 309 )...( 324 ): >Z288_HUMAN
THCRKQPRPVRIQTLV

SEQ ID NO: 29934 - protein, 16 aa, Homo sapiens
  ( 310 )...( 325 ): >Z288_HUMAN
HCRKQPRPVRIQTLVG

SEQ ID NO: 29935 - protein, 16 aa, Homo sapiens
  ( 311 )...( 326 ): >Z288_HUMAN
CRKQPRPVRIQTLVGN

SEQ ID NO: 29936 - protein, 16 aa, Homo sapiens
  ( 312 )...( 327 ): >Z288_HUMAN
RKQPRPVRIQTLVGNI

SEQ ID NO: 29937 - protein, 16 aa, Homo sapiens
  ( 313 )...( 328 ): >Z288_HUMAN
KQPRPVRIQTLVGNIH

SEQ ID NO: 29938 - protein, 16 aa, Homo sapiens
  ( 315 )...( 330 ): >Z288_HUMAN
PRPVRIQTLVGNIHIK

SEQ ID NO: 29939 - protein, 16 aa, Homo sapiens
  ( 316 )...( 331 ): >Z288_HUMAN
RPVRIQTLVGNIHIKQ

SEQ ID NO: 29940 - protein, 16 aa, Homo sapiens
  ( 374 )...( 389 ): >Z292_HUMAN
AAFKMQRKSKKGQKAN

SEQ ID NO: 29941 - protein, 16 aa, Homo sapiens
  ( 580 )...( 595 ): >Z292_HUMAN
NAQQSAPEKVKKDRGR

SEQ ID NO: 29942 - protein, 16 aa, Homo sapiens
  ( 581 )...( 596 ): >Z292_HUMAN
AQQSAPEKVKKDRGRG

SEQ ID NO: 29943 - protein, 16 aa, Homo sapiens
  ( 582 )...( 597 ): >Z292_HUMAN
QQSAPEKVKKDRGRGP

SEQ ID NO: 29944 - protein, 16 aa, Homo sapiens
  ( 585 )...( 600 ): >Z292_HUMAN
APEKVKKDRGRGPNGK

SEQ ID NO: 29945 - protein, 16 aa, Homo sapiens
  ( 586 )...( 601 ): >Z292_HUMAN
PEKVKKDRGRGPNGKE

SEQ ID NO: 29946 - protein, 16 aa, Homo sapiens
  ( 589 )...( 604 ): >Z292_HUMAN
VKKDRGRGPNGKERKP

SEQ ID NO: 29947 - protein, 16 aa, Homo sapiens
  ( 608 )...( 623 ): >Z292_HUMAN
KRAKWPAIIRDGKFIC

SEQ ID NO: 29948 - protein, 16 aa, Homo sapiens
  ( 628 )...( 643 ): >Z292_HUMAN
RAFTNPRSLGGHLSKR

SEQ ID NO: 29949 - protein, 16 aa, Homo sapiens
  ( 866 )...( 881 ): >Z292_HUMAN
LNKKGNSASKRRKKVA

SEQ ID NO: 29950 - protein, 16 aa, Homo sapiens
  ( 867 )...( 882 ): >Z292_HUMAN
NKKGNSASKRRKKVAP

SEQ ID NO: 29951 - protein, 16 aa, Homo sapiens
  ( 868 )...( 883 ): >Z292_HUMAN
KKGNSASKRRKKVAPP

SEQ ID NO: 29952 - protein, 16 aa, Homo sapiens
  ( 869 )...( 884 ): >Z292_HUMAN
KGNSASKRRKKVAPPL

SEQ ID NO: 29953 - protein, 16 aa, Homo sapiens
  ( 870 )...( 885 ): >Z292_HUMAN
GNSASKRRKKVAPPLI

SEQ ID NO: 29954 - protein, 16 aa, Homo sapiens
  ( 871 )...( 886 ): >Z292_HUMAN
NSASKRRKKVAPPLIA

SEQ ID NO: 29955 - protein, 16 aa, Homo sapiens
  ( 872 )...( 887 ): >Z292_HUMAN
SASKRRKKVAPPLIAP

SEQ ID NO: 29956 - protein, 16 aa, Homo sapiens
  ( 873 )...( 888 ): >Z292_HUMAN
ASKRRKKVAPPLIAPN

SEQ ID NO: 29957 - protein, 16 aa, Homo sapiens
  ( 874 )...( 889 ): >Z292_HUMAN
SKRRKKVAPPLIAPNA

SEQ ID NO: 29958 - protein, 16 aa, Homo sapiens
  ( 875 )...( 890 ): >Z292_HUMAN
KRRKKVAPPLIAPNAS

SEQ ID NO: 29959 - protein, 16 aa, Homo sapiens
  ( 1202 )...( 1217 ): >Z292_HUMAN
KTFTRNSNLRAHCQLV

SEQ ID NO: 29960 - protein, 16 aa, Homo sapiens
  ( 1221 )...( 1236 ): >Z292_HUMAN
TTEEMVKLKIKRPYGR

SEQ ID NO: 29961 - protein, 16 aa, Homo sapiens
  ( 1222 )...( 1237 ): >Z292_HUMAN
TEEMVKLKIKRPYGRK

SEQ ID NO: 29962 - protein, 16 aa, Homo sapiens
  ( 1225 )...( 1240 ): >Z292_HUMAN
MVKLKIKRPYGRKSQS

SEQ ID NO: 29963 - protein, 16 aa, Homo sapiens
  ( 1242 )...( 1257 ): >Z292_HUMAN
NVPASRSTQVKKQLAM

SEQ ID NO: 29964 - protein, 16 aa, Homo sapiens
  ( 1314 )...( 1329 ): >Z292_HUMAN
NTNALTNTQTKGRKIR

SEQ ID NO: 29965 - protein, 16 aa, Homo sapiens
  ( 1315 )...( 1330 ): >Z292_HUMAN
TNALTNTQTKGRKIRR

SEQ ID NO: 29966 - protein, 16 aa, Homo sapiens
  ( 1316 )...( 1331 ): >Z292_HUMAN
NALTNTQTKGRKIRRH

SEQ ID NO: 29967 - protein, 16 aa, Homo sapiens
  ( 1317 )...( 1332 ): >Z292_HUMAN
ALTNTQTKGRKIRRHK

SEQ ID NO: 29968 - protein, 16 aa, Homo sapiens
  ( 1536 )...( 1551 ): >Z292_HUMAN
IRPRRLTPGQENMSSK

SEQ ID NO: 29969 - protein, 16 aa, Homo sapiens
  ( 1559 )...( 1574 ): >Z292_HUMAN
SKHRGTKHSRCGKEGI

SEQ ID NO: 29970 - protein, 16 aa, Homo sapiens
  ( 1560 )...( 1575 ): >Z292_HUMAN
KHRGTKHSRCGKEGIK

SEQ ID NO: 29971 - protein, 16 aa, Homo sapiens
  ( 1561 )...( 1576 ): >Z292_HUMAN
HRGTKHSRCGKEGIKM

SEQ ID NO: 29972 - protein, 16 aa, Homo sapiens
  ( 1562 )...( 1577 ): >Z292_HUMAN
RGTKHSRCGKEGIKMP

SEQ ID NO: 29973 - protein, 16 aa, Homo sapiens
  ( 1564 )...( 1579 ): >Z292_HUMAN
TKHSRCGKEGIKMPKT

SEQ ID NO: 29974 - protein, 16 aa, Homo sapiens
  ( 1565 )...( 1580 ): >Z292_HUMAN
KHSRCGKEGIKMPKTK

SEQ ID NO: 29975 - protein, 16 aa, Homo sapiens
  ( 1566 )...( 1581 ): >Z292_HUMAN
HSRCGKEGIKMPKTKR

SEQ ID NO: 29976 - protein, 16 aa, Homo sapiens
  ( 1567 )...( 1582 ): >Z292_HUMAN
SRCGKEGIKMPKTKRK

SEQ ID NO: 29977 - protein, 16 aa, Homo sapiens
  ( 1568 )...( 1583 ): >Z292_HUMAN
RCGKEGIKMPKTKRKK

SEQ ID NO: 29978 - protein, 16 aa, Homo sapiens
  ( 1569 )...( 1584 ): >Z292_HUMAN
CGKEGIKMPKTKRKKK

SEQ ID NO: 29979 - protein, 16 aa, Homo sapiens
  ( 1570 )...( 1585 ): >Z292_HUMAN
GKEGIKMPKTKRKKKN

SEQ ID NO: 29980 - protein, 16 aa, Homo sapiens
  ( 1601 )...( 1616 ): >Z292_HUMAN
KPYSLKRGKHVYSIKA

SEQ ID NO: 29981 - protein, 16 aa, Homo sapiens
  ( 1605 )...( 1620 ): >Z292_HUMAN
LKRGKHVYSIKARNDA

SEQ ID NO: 29982 - protein, 16 aa, Homo sapiens
  ( 1606 )...( 1621 ): >Z292_HUMAN
KRGKHVYSIKARNDAL

SEQ ID NO: 29983 - protein, 16 aa, Homo sapiens
  ( 1607 )...( 1622 ): >Z292_HUMAN
RGKHVYSIKARNDALS

SEQ ID NO: 29984 - protein, 16 aa, Homo sapiens
  ( 1661 )...( 1676 ): >Z292_HUMAN
AFTSQHRNLLIVFKRC

SEQ ID NO: 29985 - protein, 16 aa, Homo sapiens
  ( 1667 )...( 1682 ): >Z292_HUMAN
RNLLIVFKRCCNSQVK

SEQ ID NO: 29986 - protein, 16 aa, Homo sapiens
  ( 1764 )...( 1779 ): >Z292_HUMAN
NLCQSERQKASNLKRV

SEQ ID NO: 29987 - protein, 16 aa, Homo sapiens
  ( 1765 )...( 1780 ): >Z292_HUMAN
LCQSERQKASNLKRVN

SEQ ID NO: 29988 - protein, 16 aa, Homo sapiens
  ( 1784 )...( 1799 ): >Z292_HUMAN
NVSQNKKRKVEKAEPA

SEQ ID NO: 29989 - protein, 16 aa, Homo sapiens
  ( 1787 )...( 1802 ): >Z292_HUMAN
QNKKRKVEKAEPASAA

SEQ ID NO: 29990 - protein, 16 aa, Homo sapiens
  ( 146 )...( 161 ): >Z295_HUMAN
KRSVIVCQSRNEAQGK

SEQ ID NO: 29991 - protein, 16 aa, Homo sapiens
  ( 229 )...( 244 ): >Z295_HUMAN
PNRISLVKRNAVLPSK

SEQ ID NO: 29992 - protein, 16 aa, Homo sapiens
  ( 230 )...( 245 ): >Z295_HUMAN
NRISLVKRNAVLPSKP

SEQ ID NO: 29993 - protein, 16 aa, Homo sapiens
  ( 231 )...( 246 ): >Z295_HUMAN
RISLVKRNAVLPSKPL

SEQ ID NO: 29994 - protein, 16 aa, Homo sapiens
  ( 232 )...( 247 ): >Z295_HUMAN
ISLVKRNAVLPSKPLQ

SEQ ID NO: 29995 - protein, 16 aa, Homo sapiens
  ( 234 )...( 249 ): >Z295_HUMAN
LVKRNAVLPSKPLQDR

SEQ ID NO: 29996 - protein, 16 aa, Homo sapiens
  ( 259 )...( 274 ): >Z295_HUMAN
SGQLPKGKALELALKR

SEQ ID NO: 29997 - protein, 16 aa, Homo sapiens
  ( 260 )...( 275 ): >Z295_HUMAN
GQLPKGKALELALKRP

SEQ ID NO: 29998 - protein, 16 aa, Homo sapiens
  ( 261 )...( 276 ): >Z295_HUMAN
QLPKGKALELALKRPR

SEQ ID NO: 29999 - protein, 16 aa, Homo sapiens
  ( 262 )...( 277 ): >Z295_HUMAN
LPKGKALELALKRPRP

SEQ ID NO: 30000 - protein, 16 aa, Homo sapiens
  ( 263 )...( 278 ): >Z295_HUMAN
PKGKALELALKRPRPP

SEQ ID NO: 30001 - protein, 16 aa, Homo sapiens
  ( 264 )...( 279 ): >Z295_HUMAN
KGKALELALKRPRPPV

SEQ ID NO: 30002 - protein, 16 aa, Homo sapiens
  ( 265 )...( 280 ): >Z295_HUMAN
GKALELALKRPRPPVL

SEQ ID NO: 30003 - protein, 16 aa, Homo sapiens
  ( 266 )...( 281 ): >Z295_HUMAN
KALELALKRPRPPVLS

SEQ ID NO: 30004 - protein, 16 aa, Homo sapiens
  ( 327 )...( 342 ): >Z295_HUMAN
QSIDRSGPLVKSLLRR

SEQ ID NO: 30005 - protein, 16 aa, Homo sapiens
  ( 328 )...( 343 ): >Z295_HUMAN
SIDRSGPLVKSLLRRS

SEQ ID NO: 30006 - protein, 16 aa, Homo sapiens
  ( 329 )...( 344 ): >Z295_HUMAN
IDRSGPLVKSLLRRSL

SEQ ID NO: 30007 - protein, 16 aa, Homo sapiens
  ( 330 )...( 345 ): >Z295_HUMAN
DRSGPLVKSLLRRSLS

SEQ ID NO: 30008 - protein, 16 aa, Homo sapiens
  ( 331 )...( 346 ): >Z295_HUMAN
RSGPLVKSLLRRSLSM

SEQ ID NO: 30009 - protein, 16 aa, Homo sapiens
  ( 549 )...( 564 ): >Z295_HUMAN
KHCLKIFRSTAGLHRH

SEQ ID NO: 30010 - protein, 16 aa, Homo sapiens
  ( 620 )...( 635 ): >Z295_HUMAN
RKLIDIVREREIKKAL

SEQ ID NO: 30011 - protein, 16 aa, Homo sapiens
  ( 625 )...( 640 ): >Z295_HUMAN
IVREREIKKALIIKLR

SEQ ID NO: 30012 - protein, 16 aa, Homo sapiens
  ( 627 )...( 642 ): >Z295_HUMAN
REREIKKALIIKLRRG

SEQ ID NO: 30013 - protein, 16 aa, Homo sapiens
  ( 628 )...( 643 ): >Z295_HUMAN
EREIKKALIIKLRRGK

SEQ ID NO: 30014 - protein, 16 aa, Homo sapiens
  ( 629 )...( 644 ): >Z295_HUMAN
REIKKALIIKLRRGKP

SEQ ID NO: 30015 - protein, 16 aa, Homo sapiens
  ( 630 )...( 645 ): >Z295_HUMAN
EIKKALIIKLRRGKPG

SEQ ID NO: 30016 - protein, 16 aa, Homo sapiens
  ( 631 )...( 646 ): >Z295_HUMAN
IKKALIIKLRRGKPGF

SEQ ID NO: 30017 - protein, 16 aa, Homo sapiens
  ( 632 )...( 647 ): >Z295_HUMAN
KKALIIKLRRGKPGFQ

SEQ ID NO: 30018 - protein, 16 aa, Homo sapiens
  ( 633 )...( 648 ): >Z295_HUMAN
KALIIKLRRGKPGFQG

SEQ ID NO: 30019 - protein, 16 aa, Homo sapiens
  ( 634 )...( 649 ): >Z295_HUMAN
ALIIKLRRGKPGFQGQ

SEQ ID NO: 30020 - protein, 16 aa, Homo sapiens
  ( 635 )...( 650 ): >Z295_HUMAN
LIIKLRRGKPGFQGQS

SEQ ID NO: 30021 - protein, 16 aa, Homo sapiens
  ( 636 )...( 651 ): >Z295_HUMAN
IIKLRRGKPGFQGQSS

SEQ ID NO: 30022 - protein, 16 aa, Homo sapiens
  ( 637 )...( 652 ): >Z295_HUMAN
IKLRRGKPGFQGQSSS

SEQ ID NO: 30023 - protein, 16 aa, Homo sapiens
  ( 638 )...( 653 ): >Z295_HUMAN
KLRRGKPGFQGQSSSQ

SEQ ID NO: 30024 - protein, 16 aa, Homo sapiens
  ( 648 )...( 663 ): >Z295_HUMAN
GQSSSQAQQVIKRNLR

SEQ ID NO: 30025 - protein, 16 aa, Homo sapiens
  ( 649 )...( 664 ): >Z295_HUMAN
QSSSQAQQVIKRNLRS

SEQ ID NO: 30026 - protein, 16 aa, Homo sapiens
  ( 650 )...( 665 ): >Z295_HUMAN
SSSQAQQVIKRNLRSR

SEQ ID NO: 30027 - protein, 16 aa, Homo sapiens
  ( 651 )...( 666 ): >Z295_HUMAN
SSQAQQVIKRNLRSRA

SEQ ID NO: 30028 - protein, 16 aa, Homo sapiens
  ( 652 )...( 667 ): >Z295_HUMAN
SQAQQVIKRNLRSRAK

SEQ ID NO: 30029 - protein, 16 aa, Homo sapiens
  ( 653 )...( 668 ): >Z295_HUMAN
QAQQVIKRNLRSRAKG

SEQ ID NO: 30030 - protein, 16 aa, Homo sapiens
  ( 654 )...( 669 ): >Z295_HUMAN
AQQVIKRNLRSRAKGA

SEQ ID NO: 30031 - protein, 16 aa, Homo sapiens
  ( 655 )...( 670 ): >Z295_HUMAN
QQVIKRNLRSRAKGAY

SEQ ID NO: 30032 - protein, 16 aa, Homo sapiens
  ( 656 )...( 671 ): >Z295_HUMAN
QVIKRNLRSRAKGAYI

SEQ ID NO: 30033 - protein, 16 aa, Homo sapiens
  ( 657 )...( 672 ): >Z295_HUMAN
VIKRNLRSRAKGAYIC

SEQ ID NO: 30034 - protein, 16 aa, Homo sapiens
  ( 658 )...( 673 ): >Z295_HUMAN
IKRNLRSRAKGAYICT

SEQ ID NO: 30035 - protein, 16 aa, Homo sapiens
  ( 659 )...( 674 ): >Z295_HUMAN
KRNLRSRAKGAYICTY

SEQ ID NO: 30036 - protein, 16 aa, Homo sapiens
  ( 59 )...( 74 ): >Z297_HUMAN
VSIRVQGREFRAHRAV

SEQ ID NO: 30037 - protein, 16 aa, Homo sapiens
  ( 60 )...( 75 ): >Z297_HUMAN
SIRVQGREFRAHRAVL

SEQ ID NO: 30038 - protein, 16 aa, Homo sapiens
  ( 61 )...( 76 ): >Z297_HUMAN
IRVQGREFRAHRAVLA

SEQ ID NO: 30039 - protein, 16 aa, Homo sapiens
  ( 62 )...( 77 ): >Z297_HUMAN
RVQGREFRAHRAVLAA

SEQ ID NO: 30040 - protein, 16 aa, Homo sapiens
  ( 272 )...( 287 ): >Z297_HUMAN
RGAVVPGAGLRRPTYT

SEQ ID NO: 30041 - protein, 16 aa, Homo sapiens
  ( 558 )...( 573 ): >Z297_HUMAN
RHRGHCERRHRLGGVG

SEQ ID NO: 30042 - protein, 16 aa, Homo sapiens
  ( 559 )...( 574 ): >Z297_HUMAN
HRGHCERRHRLGGVGA

SEQ ID NO: 30043 - protein, 16 aa, Homo sapiens
  ( 560 )...( 575 ): >Z297_HUMAN
RGHCERRHRLGGVGAV

SEQ ID NO: 30044 - protein, 16 aa, Homo sapiens
  ( 406 )...( 421 ): >Z29B_HUMAN
GKKFKMKHHLVGHMKI

SEQ ID NO: 30045 - protein, 16 aa, Homo sapiens
  ( 274 )...( 289 ): >Z300_HUMAN
CGKAFAKKSQLIVHQR

SEQ ID NO: 30046 - protein, 16 aa, Homo sapiens
  ( 275 )...( 290 ): >Z300_HUMAN
GKAFAKKSQLIVHQRI

SEQ ID NO: 30047 - protein, 16 aa, Homo sapiens
  ( 276 )...( 291 ): >Z300_HUMAN
KAFAKKSQLIVHQRIH

SEQ ID NO: 30048 - protein, 16 aa, Homo sapiens
  ( 279 )...( 294 ): >Z300_HUMAN
AKKSQLIVHQRIHTGK

SEQ ID NO: 30049 - protein, 16 aa, Homo sapiens
  ( 280 )...( 295 ): >Z300_HUMAN
KKSQLIVHQRIHTGKK

SEQ ID NO: 30050 - protein, 16 aa, Homo sapiens
  ( 281 )...( 296 ): >Z300_HUMAN
KSQLIVHQRIHTGKKP

SEQ ID NO: 30051 - protein, 16 aa, Homo sapiens
  ( 470 )...( 485 ): >Z300_HUMAN
CGKTFSRKSQLIIHQR

SEQ ID NO: 30052 - protein, 16 aa, Homo sapiens
  ( 471 )...( 486 ): >Z300_HUMAN
GKTFSRKSQLIIHQRT

SEQ ID NO: 30053 - protein, 16 aa, Homo sapiens
  ( 145 )...( 160 ): >Z302_HUMAN
AFLIYFRLGIKMGKQG

SEQ ID NO: 30054 - protein, 16 aa, Homo sapiens
  ( 148 )...( 163 ): >Z302_HUMAN
IYFRLGIKMGKQGIIN

SEQ ID NO: 30055 - protein, 16 aa, Homo sapiens
  ( 149 )...( 164 ): >Z302_HUMAN
YFRLGIKMGKQGIINK

SEQ ID NO: 30056 - protein, 16 aa, Homo sapiens
  ( 150 )...( 165 ): >Z302_HUMAN
FRLGIKMGKQGIINKE

SEQ ID NO: 30057 - protein, 16 aa, Homo sapiens
  ( 151 )...( 166 ): >Z302_HUMAN
RLGIKMGKQGIINKEG

SEQ ID NO: 30058 - protein, 16 aa, Homo sapiens
  ( 227 )...( 242 ): >Z302_HUMAN
KYDILKKNLSKKSVIK

SEQ ID NO: 30059 - protein, 16 aa, Homo sapiens
  ( 228 )...( 243 ): >Z302_HUMAN
YDILKKNLSKKSVIKS

SEQ ID NO: 30060 - protein, 16 aa, Homo sapiens
  ( 230 )...( 245 ): >Z302_HUMAN
ILKKNLSKKSVIKSER

SEQ ID NO: 30061 - protein, 16 aa, Homo sapiens
  ( 231 )...( 246 ): >Z302_HUMAN
LKKNLSKKSVIKSERI

SEQ ID NO: 30062 - protein, 16 aa, Homo sapiens
  ( 232 )...( 247 ): >Z302_HUMAN
KKNLSKKSVIKSERIN

SEQ ID NO: 30063 - protein, 16 aa, Homo sapiens
  ( 233 )...( 248 ): >Z302_HUMAN
KNLSKKSVIKSERING

SEQ ID NO: 30064 - protein, 16 aa, Homo sapiens
  ( 235 )...( 250 ): >Z302_HUMAN
LSKKSVIKSERINGGK

SEQ ID NO: 30065 - protein, 16 aa, Homo sapiens
  ( 236 )...( 251 ): >Z302_HUMAN
SKKSVIKSERINGGKK

SEQ ID NO: 30066 - protein, 16 aa, Homo sapiens
  ( 237 )...( 252 ): >Z302_HUMAN
KKSVIKSERINGGKKL

SEQ ID NO: 30067 - protein, 16 aa, Homo sapiens
  ( 238 )...( 253 ): >Z302_HUMAN
KSVIKSERINGGKKLL

SEQ ID NO: 30068 - protein, 16 aa, Homo sapiens
  ( 239 )...( 254 ): >Z302_HUMAN
SVIKSERINGGKKLLN

SEQ ID NO: 30069 - protein, 16 aa, Homo sapiens
  ( 240 )...( 255 ): >Z302_HUMAN
VIKSERINGGKKLLNS

SEQ ID NO: 30070 - protein, 16 aa, Homo sapiens
  ( 241 )...( 256 ): >Z302_HUMAN
IKSERINGGKKLLNSN

SEQ ID NO: 30071 - protein, 16 aa, Homo sapiens
  ( 242 )...( 257 ): >Z302_HUMAN
KSERINGGKKLLNSNK

SEQ ID NO: 30072 - protein, 16 aa, Homo sapiens
  ( 244 )...( 259 ): >Z302_HUMAN
ERINGGKKLLNSNKSG

SEQ ID NO: 30073 - protein, 16 aa, Homo sapiens
  ( 286 )...( 301 ): >Z302_HUMAN
GKAFGKQSILSRHWRI

SEQ ID NO: 30074 - protein, 16 aa, Homo sapiens
  ( 369 )...( 384 ): >Z302_HUMAN
CGKSFSRVSLLIQHLR

SEQ ID NO: 30075 - protein, 16 aa, Homo sapiens
  ( 370 )...( 385 ): >Z302_HUMAN
GKSFSRVSLLIQHLRI

SEQ ID NO: 30076 - protein, 16 aa, Homo sapiens
  ( 108 )...( 123 ): >Z304_HUMAN
QGSHLTQKLCTRGLCR

SEQ ID NO: 30077 - protein, 16 aa, Homo sapiens
  ( 109 )...( 124 ): >Z304_HUMAN
GSHLTQKLCTRGLCRR

SEQ ID NO: 30078 - protein, 16 aa, Homo sapiens
  ( 110 )...( 125 ): >Z304_HUMAN
SHLTQKLCTRGLCRRR

SEQ ID NO: 30079 - protein, 16 aa, Homo sapiens
  ( 111 )...( 126 ): >Z304_HUMAN
HLTQKLCTRGLCRRRF

SEQ ID NO: 30080 - protein, 16 aa, Homo sapiens
  ( 112 )...( 127 ): >Z304_HUMAN
LTQKLCTRGLCRRRFS

SEQ ID NO: 30081 - protein, 16 aa, Homo sapiens
  ( 113 )...( 128 ): >Z304_HUMAN
TQKLCTRGLCRRRFSF

SEQ ID NO: 30082 - protein, 16 aa, Homo sapiens
  ( 313 )...( 328 ): >Z304_HUMAN
GKAFSRKDTLAQHQRV

SEQ ID NO: 30083 - protein, 16 aa, Homo sapiens
  ( 368 )...( 383 ): >Z304_HUMAN
CGKAFSRKDTLVQHQR

SEQ ID NO: 30084 - protein, 16 aa, Homo sapiens
  ( 593 )...( 608 ): >Z304_HUMAN
GKFFSRNSGLILHQRV

SEQ ID NO: 30085 - protein, 16 aa, Homo sapiens
  ( 621 )...( 636 ): >Z304_HUMAN
GKAYSRSSHLVRHQKA

SEQ ID NO: 30086 - protein, 16 aa, Homo sapiens
  ( 297 )...( 312 ): >Z306_HUMAN
QEGRLQRKQKNATGGR

SEQ ID NO: 30087 - protein, 16 aa, Homo sapiens
  ( 299 )...( 314 ): >Z306_HUMAN
GRLQRKQKNATGGRRH

SEQ ID NO: 30088 - protein, 16 aa, Homo sapiens
  ( 301 )...( 316 ): >Z306_HUMAN
LQRKQKNATGGRRHIC

SEQ ID NO: 30089 - protein, 16 aa, Homo sapiens
  ( 302 )...( 317 ): >Z306_HUMAN
QRKQKNATGGRRHICH

SEQ ID NO: 30090 - protein, 16 aa, Homo sapiens
  ( 303 )...( 318 ): >Z306_HUMAN
RKQKNATGGRRHICHE

SEQ ID NO: 30091 - protein, 16 aa, Homo sapiens
  ( 320 )...( 335 ): >Z306_HUMAN
GKSFAQSSGLSKHRRI

SEQ ID NO: 30092 - protein, 16 aa, Homo sapiens
  ( 321 )...( 336 ): >Z306_HUMAN
KSFAQSSGLSKHRRIH

SEQ ID NO: 30093 - protein, 16 aa, Homo sapiens
  ( 513 )...( 528 ): >Z306_HUMAN
CGKGFTRISYLVQHQR

SEQ ID NO: 30094 - protein, 16 aa, Homo sapiens
  ( 514 )...( 529 ): >Z306_HUMAN
GKGFTRISYLVQHQRS

SEQ ID NO: 30095 - protein, 16 aa, Homo sapiens
  ( 303 )...( 318 ): >Z307_HUMAN
QEGRLQRKQKNAIGSR

SEQ ID NO: 30096 - protein, 16 aa, Homo sapiens
  ( 326 )...( 341 ): >Z307_HUMAN
GKSFAQSSGLTKHRRI

SEQ ID NO: 30097 - protein, 16 aa, Homo sapiens
  ( 327 )...( 342 ): >Z307_HUMAN
KSFAQSSGLTKHRRIH

SEQ ID NO: 30098 - protein, 16 aa, Homo sapiens
  ( 520 )...( 535 ): >Z307_HUMAN
CGKGFTRTSYLVQHQR

SEQ ID NO: 30099 - protein, 16 aa, Homo sapiens
  ( 526 )...( 541 ): >Z307_HUMAN
RTSYLVQHQRSHVGKK

SEQ ID NO: 30100 - protein, 16 aa, Homo sapiens
  ( 196 )...( 211 ): >Z317_HUMAN
RRDYGVAFKGRPHLTQ

SEQ ID NO: 30101 - protein, 16 aa, Homo sapiens
  ( 227 )...( 242 ): >Z317_HUMAN
CQKAFTTSASLTRHRR

SEQ ID NO: 30102 - protein, 16 aa, Homo sapiens
  ( 228 )...( 243 ): >Z317_HUMAN
QKAFTTSASLTRHRRI

SEQ ID NO: 30103 - protein, 16 aa, Homo sapiens
  ( 229 )...( 244 ): >Z317_HUMAN
KAFTTSASLTRHRRIH

SEQ ID NO: 30104 - protein, 16 aa, Homo sapiens
  ( 284 )...( 299 ): >Z317_HUMAN
GNAFRTLSALKIHMRV

SEQ ID NO: 30105 - protein, 16 aa, Homo sapiens
  ( 395 )...( 410 ): >Z317_HUMAN
CGKSFGDLVSRRKHIR

SEQ ID NO: 30106 - protein, 16 aa, Homo sapiens
  ( 396 )...( 411 ): >Z317_HUMAN
GKSFGDLVSRRKHIRI

SEQ ID NO: 30107 - protein, 16 aa, Homo sapiens
  ( 398 )...( 413 ): >Z317_HUMAN
SFGDLVSRRKHIRIHI

SEQ ID NO: 30108 - protein, 16 aa, Homo sapiens
  ( 399 )...( 414 ): >Z317_HUMAN
FGDLVSRRKHIRIHIV

SEQ ID NO: 30109 - protein, 16 aa, Homo sapiens
  ( 400 )...( 415 ): >Z317_HUMAN
GDLVSRRKHIRIHIVK

SEQ ID NO: 30110 - protein, 16 aa, Homo sapiens
  ( 408 )...( 423 ): >Z317_HUMAN
HIRIHIVKKPVECRQC

SEQ ID NO: 30111 - protein, 16 aa, Homo sapiens
  ( 409 )...( 424 ): >Z317_HUMAN
IRIHIVKKPVECRQCG

SEQ ID NO: 30112 - protein, 16 aa, Homo sapiens
  ( 410 )...( 425 ): >Z317_HUMAN
RIHIVKKPVECRQCGK

SEQ ID NO: 30113 - protein, 16 aa, Homo sapiens
  ( 413 )...( 428 ): >Z317_HUMAN
IVKKPVECRQCGKTFR

SEQ ID NO: 30114 - protein, 16 aa, Homo sapiens
  ( 420 )...( 435 ): >Z317_HUMAN
CRQCGKTFRNQSILKT

SEQ ID NO: 30115 - protein, 16 aa, Homo sapiens
  ( 421 )...( 436 ): >Z317_HUMAN
RQCGKTFRNQSILKTH

SEQ ID NO: 30116 - protein, 16 aa, Homo sapiens
  ( 480 )...( 495 ): >Z317_HUMAN
GKVFGDYLSRRRHMSV

SEQ ID NO: 30117 - protein, 16 aa, Homo sapiens
  ( 493 )...( 508 ): >Z317_HUMAN
MSVHLVKKRVECRQCG

SEQ ID NO: 30118 - protein, 16 aa, Homo sapiens
  ( 494 )...( 509 ): >Z317_HUMAN
SVHLVKKRVECRQCGK

SEQ ID NO: 30119 - protein, 16 aa, Homo sapiens
  ( 495 )...( 510 ): >Z317_HUMAN
VHLVKKRVECRQCGKA

SEQ ID NO: 30120 - protein, 16 aa, Homo sapiens
  ( 496 )...( 511 ): >Z317_HUMAN
HLVKKRVECRQCGKAF

SEQ ID NO: 30121 - protein, 16 aa, Homo sapiens
  ( 497 )...( 512 ): >Z317_HUMAN
LVKKRVECRQCGKAFR

SEQ ID NO: 30122 - protein, 16 aa, Homo sapiens
  ( 498 )...( 513 ): >Z317_HUMAN
VKKRVECRQCGKAFRN

SEQ ID NO: 30123 - protein, 16 aa, Homo sapiens
  ( 505 )...( 520 ): >Z317_HUMAN
RQCGKAFRNQSTLKTH

SEQ ID NO: 30124 - protein, 16 aa, Homo sapiens
  ( 508 )...( 523 ): >Z317_HUMAN
GKAFRNQSTLKTHMRS

SEQ ID NO: 30125 - protein, 16 aa, Homo sapiens
  ( 536 )...( 551 ): >Z317_HUMAN
GKAFSIGSNLNVHRRI

SEQ ID NO: 30126 - protein, 16 aa, Homo sapiens
  ( 579 )...( 594 ): >Z317_HUMAN
THRGEKLFVSSVWKRL

SEQ ID NO: 30127 - protein, 15 aa, Homo sapiens
  ( 581 )...( 596 ): >Z317_HUMAN
RGEKLFVSSVWKRLQ

SEQ ID NO: 30128 - protein, 16 aa, Homo sapiens
  ( 434 )...( 449 ): >Z319_HUMAN
NKAYKRASALQKHQLA

SEQ ID NO: 30129 - protein, 16 aa, Homo sapiens
  ( 435 )...( 450 ): >Z319_HUMAN
KAYKRASALQKHQLAH

SEQ ID NO: 30130 - protein, 16 aa, Homo sapiens
  ( 301 )...( 316 ): >Z323_HUMAN
GKAFSASNGLTRHRRI

SEQ ID NO: 30131 - protein, 16 aa, Homo sapiens
  ( 302 )...( 317 ): >Z323_HUMAN
KAFSASNGLTRHRRIH

SEQ ID NO: 30132 - protein, 16 aa, Homo sapiens
  ( 343 )...( 358 ): >Z323_HUMAN
RIHTGEKRYQCRECGK

SEQ ID NO: 30133 - protein, 16 aa, Homo sapiens
  ( 382 )...( 397 ): >Z323_HUMAN
SQCSKLFSKRTLLKKH

SEQ ID NO: 30134 - protein, 16 aa, Homo sapiens
  ( 388 )...( 403 ): >Z323_HUMAN
FSKRTLLKKHQKIHTG

SEQ ID NO: 30135 - protein, 16 aa, Homo sapiens
  ( 391 )...( 406 ): >Z323_HUMAN
RTLLKKHQKIHTGERP

SEQ ID NO: 30136 - protein, 16 aa, Homo sapiens
  ( 62 )...( 77 ): >Z324_HUMAN
PSGTDTTLSRTTYRRR

SEQ ID NO: 30137 - protein, 16 aa, Homo sapiens
  ( 63 )...( 78 ): >Z324_HUMAN
SGTDTTLSRTTYRRRN

SEQ ID NO: 30138 - protein, 16 aa, Homo sapiens
  ( 64 )...( 79 ): >Z324_HUMAN
GTDTTLSRTTYRRRNP

SEQ ID NO: 30139 - protein, 16 aa, Homo sapiens
  ( 65 )...( 80 ): >Z324_HUMAN
TDTTLSRTTYRRRNPG

SEQ ID NO: 30140 - protein, 16 aa, Homo sapiens
  ( 66 )...( 81 ): >Z324_HUMAN
DTTLSRTTYRRRNPGS

SEQ ID NO: 30141 - protein, 16 aa, Homo sapiens
  ( 117 )...( 132 ): >Z324_HUMAN
HSVKSLQRQRGASPSR

SEQ ID NO: 30142 - protein, 16 aa, Homo sapiens
  ( 118 )...( 133 ): >Z324_HUMAN
SVKSLQRQRGASPSRE

SEQ ID NO: 30143 - protein, 16 aa, Homo sapiens
  ( 119 )...( 134 ): >Z324_HUMAN
VKSLQRQRGASPSRER

SEQ ID NO: 30144 - protein, 16 aa, Homo sapiens
  ( 123 )...( 138 ): >Z324_HUMAN
QRQRGASPSRERKPTG

SEQ ID NO: 30145 - protein, 16 aa, Homo sapiens
  ( 124 )...( 139 ): >Z324_HUMAN
RQRGASPSRERKPTGV

SEQ ID NO: 30146 - protein, 16 aa, Homo sapiens
  ( 126 )...( 141 ): >Z324_HUMAN
RGASPSRERKPTGVSV

SEQ ID NO: 30147 - protein, 16 aa, Homo sapiens
  ( 160 )...( 175 ): >Z324_HUMAN
LRLTSPLRPPEGVRLR

SEQ ID NO: 30148 - protein, 16 aa, Homo sapiens
  ( 183 )...( 198 ): >Z324_HUMAN
ALLGRQPRTPERQKPC

SEQ ID NO: 30149 - protein, 16 aa, Homo sapiens
  ( 184 )...( 199 ): >Z324_HUMAN
LLGRQPRTPERQKPCA

SEQ ID NO: 30150 - protein, 16 aa, Homo sapiens
  ( 185 )...( 200 ): >Z324_HUMAN
LGRQPRTPERQKPCAQ

SEQ ID NO: 30151 - protein, 16 aa, Homo sapiens
  ( 319 )...( 334 ): >Z324_HUMAN
GKAFRHSSSLVRHQRI

SEQ ID NO: 30152 - protein, 16 aa, Homo sapiens
  ( 459 )...( 474 ): >Z324_HUMAN
GKAFAKGAVLLSHRRI

SEQ ID NO: 30153 - protein, 16 aa, Homo sapiens
  ( 460 )...( 475 ): >Z324_HUMAN
KAFAKGAVLLSHRRIH

SEQ ID NO: 30154 - protein, 16 aa, Homo sapiens
  ( 499 )...( 514 ): >Z324_HUMAN
HQRIHTGEKTVRRSRA

SEQ ID NO: 30155 - protein, 16 aa, Homo sapiens
  ( 500 )...( 515 ): >Z324_HUMAN
QRIHTGEKTVRRSRAS

SEQ ID NO: 30156 - protein, 16 aa, Homo sapiens
  ( 501 )...( 516 ): >Z324_HUMAN
RIHTGEKTVRRSRASL

SEQ ID NO: 30157 - protein, 16 aa, Homo sapiens
  ( 504 )...( 519 ): >Z324_HUMAN
TGEKTVRRSRASLHPQ

SEQ ID NO: 30158 - protein, 16 aa, Homo sapiens
  ( 505 )...( 520 ): >Z324_HUMAN
GEKTVRRSRASLHPQA

SEQ ID NO: 30159 - protein, 16 aa, Homo sapiens
  ( 507 )...( 522 ): >Z324_HUMAN
KTVRRSRASLHPQARS

SEQ ID NO: 30160 - protein, 16 aa, Homo sapiens
  ( 508 )...( 523 ): >Z324_HUMAN
TVRRSRASLHPQARSV

SEQ ID NO: 30161 - protein, 16 aa, Homo sapiens
  ( 509 )...( 524 ): >Z324_HUMAN
VRRSRASLHPQARSVA

SEQ ID NO: 30162 - protein, 16 aa, Homo sapiens
  ( 510 )...( 525 ): >Z324_HUMAN
RRSRASLHPQARSVAG

SEQ ID NO: 30163 - protein, 16 aa, Homo sapiens
  ( 275 )...( 290 ): >Z325_HUMAN
GKSFCKKSKFIIHQRT

SEQ ID NO: 30164 - protein, 16 aa, Homo sapiens
  ( 415 )...( 430 ): >Z325_HUMAN
GKCFCRKSTLTTHLRT

SEQ ID NO: 30165 - protein, 16 aa, Homo sapiens
  ( 484 )...( 499 ): >Z325_HUMAN
QRIHRRGNMNVIDVGR

SEQ ID NO: 30166 - protein, 16 aa, Homo sapiens
  ( 485 )...( 500 ): >Z325_HUMAN
RIHRRGNMNVIDVGRL

SEQ ID NO: 30167 - protein, 16 aa, Homo sapiens
  ( 193 )...( 208 ): >Z328_HUMAN
AMRQMVFMQKQVLSQR

SEQ ID NO: 30168 - protein, 16 aa, Homo sapiens
  ( 195 )...( 210 ): >Z328_HUMAN
RQMVFMQKQVLSQRSS

SEQ ID NO: 30169 - protein, 16 aa, Homo sapiens
  ( 432 )...( 447 ): >Z328_HUMAN
KCGKVFRNRSALTKHE

SEQ ID NO: 30170 - protein, 16 aa, Homo sapiens
  ( 433 )...( 448 ): >Z328_HUMAN
CGKVFRNRSALTKHER

SEQ ID NO: 30171 - protein, 16 aa, Homo sapiens
  ( 434 )...( 449 ): >Z328_HUMAN
GKVFRNRSALTKHERT

SEQ ID NO: 30172 - protein, 16 aa, Homo sapiens
  ( 695 )...( 710 ): >Z328_HUMAN
LIAHRRTHTGEKPYRC

SEQ ID NO: 30173 - protein, 16 aa, Homo sapiens
  ( 18 )...( 33 ): >Z333_HUMAN
ALLDSARRSLCKYRML

SEQ ID NO: 30174 - protein, 16 aa, Homo sapiens
  ( 29 )...( 44 ): >Z333_HUMAN
KYRMLDQCRTLASRGT

SEQ ID NO: 30175 - protein, 16 aa, Homo sapiens
  ( 512 )...( 527 ): >Z333_HUMAN
GKPFRTSTHLNVHKRI

SEQ ID NO: 30176 - protein, 16 aa, Homo sapiens
  ( 576 )...( 591 ): >Z333_HUMAN
SLRKHARTHSGKKPYA

SEQ ID NO: 30177 - protein, 16 aa, Homo sapiens
  ( 637 )...( 652 ): >Z333_HUMAN
KRTHVGRETIRNGSLP

SEQ ID NO: 30178 - protein, 16 aa, Homo sapiens
  ( 149 )...( 164 ): >Z334_HUMAN
VIVAKKSKENRKIPDG

SEQ ID NO: 30179 - protein, 16 aa, Homo sapiens
  ( 150 )...( 165 ): >Z334_HUMAN
IVAKKSKENRKIPDGY

SEQ ID NO: 30180 - protein, 16 aa, Homo sapiens
  ( 167 )...( 182 ): >Z334_HUMAN
GFGKHEKSHLGMKKYR

SEQ ID NO: 30181 - protein, 16 aa, Homo sapiens
  ( 211 )...( 226 ): >Z334_HUMAN
YNKCGKTFFKRAILIT

SEQ ID NO: 30182 - protein, 16 aa, Homo sapiens
  ( 212 )...( 227 ): >Z334_HUMAN
NKCGKTFFKRAILITQ

SEQ ID NO: 30183 - protein, 16 aa, Homo sapiens
  ( 213 )...( 228 ): >Z334_HUMAN
KCGKTFFKRAILITQK

SEQ ID NO: 30184 - protein, 16 aa, Homo sapiens
  ( 214 )...( 229 ): >Z334_HUMAN
CGKTFFKRAILITQKG

SEQ ID NO: 30185 - protein, 16 aa, Homo sapiens
  ( 215 )...( 230 ): >Z334_HUMAN
GKTFFKRAILITQKGR

SEQ ID NO: 30186 - protein, 16 aa, Homo sapiens
  ( 216 )...( 231 ): >Z334_HUMAN
KTFFKRAILITQKGRQ

SEQ ID NO: 30187 - protein, 16 aa, Homo sapiens
  ( 217 )...( 232 ): >Z334_HUMAN
TFFKRAILITQKGRQT

SEQ ID NO: 30188 - protein, 16 aa, Homo sapiens
  ( 218 )...( 233 ): >Z334_HUMAN
FFKRAILITQKGRQTE

SEQ ID NO: 30189 - protein, 16 aa, Homo sapiens
  ( 219 )...( 234 ): >Z334_HUMAN
FKRAILITQKGRQTER

SEQ ID NO: 30190 - protein, 16 aa, Homo sapiens
  ( 220 )...( 235 ): >Z334_HUMAN
KRAILITQKGRQTERK

SEQ ID NO: 30191 - protein, 16 aa, Homo sapiens
  ( 221 )...( 236 ): >Z334_HUMAN
RAILITQKGRQTERKP

SEQ ID NO: 30192 - protein, 16 aa, Homo sapiens
  ( 222 )...( 237 ): >Z334_HUMAN
AILITQKGRQTERKPN

SEQ ID NO: 30193 - protein, 16 aa, Homo sapiens
  ( 242 )...( 257 ): >Z334_HUMAN
CRKTFSKRSTLIVHQR

SEQ ID NO: 30194 - protein, 16 aa, Homo sapiens
  ( 243 )...( 258 ): >Z334_HUMAN
RKTFSKRSTLIVHQRI

SEQ ID NO: 30195 - protein, 16 aa, Homo sapiens
  ( 244 )...( 259 ): >Z334_HUMAN
KTFSKRSTLIVHQRIH

SEQ ID NO: 30196 - protein, 16 aa, Homo sapiens
  ( 267 )...( 282 ): >Z334_HUMAN
CSDCRKTFRVKTSLTR

SEQ ID NO: 30197 - protein, 16 aa, Homo sapiens
  ( 268 )...( 283 ): >Z334_HUMAN
SDCRKTFRVKTSLTRH

SEQ ID NO: 30198 - protein, 16 aa, Homo sapiens
  ( 274 )...( 289 ): >Z334_HUMAN
FRVKTSLTRHRRIHTG

SEQ ID NO: 30199 - protein, 16 aa, Homo sapiens
  ( 275 )...( 290 ): >Z334_HUMAN
RVKTSLTRHRRIHTGE

SEQ ID NO: 30200 - protein, 16 aa, Homo sapiens
  ( 276 )...( 291 ): >Z334_HUMAN
VKTSLTRHRRIHTGER

SEQ ID NO: 30201 - protein, 16 aa, Homo sapiens
  ( 550 )...( 565 ): >Z334_HUMAN
GRTYCRKSALTHHQRT

SEQ ID NO: 30202 - protein, 16 aa, Homo sapiens
  ( 555 )...( 570 ): >Z334_HUMAN
RKSALTHHQRTHTGQR

SEQ ID NO: 30203 - protein, 16 aa, Homo sapiens
  ( 248 )...( 263 ): >Z335_HUMAN
KMCQYRSSTKATLLRH

SEQ ID NO: 30204 - protein, 16 aa, Homo sapiens
  ( 250 )...( 265 ): >Z335_HUMAN
CQYRSSTKATLLRHMR

SEQ ID NO: 30205 - protein, 16 aa, Homo sapiens
  ( 275 )...( 290 ): >Z335_HUMAN
AAAAAGKKGRLRKWST

SEQ ID NO: 30206 - protein, 16 aa, Homo sapiens
  ( 276 )...( 291 ): >Z335_HUMAN
AAAAGKKGRLRKWSTS

SEQ ID NO: 30207 - protein, 16 aa, Homo sapiens
  ( 277 )...( 292 ): >Z335_HUMAN
AAAGKKGRLRKWSTST

SEQ ID NO: 30208 - protein, 16 aa, Homo sapiens
  ( 278 )...( 293 ): >Z335_HUMAN
AAGKKGRLRKWSTSTK

SEQ ID NO: 30209 - protein, 16 aa, Homo sapiens
  ( 279 )...( 294 ): >Z335_HUMAN
AGKKGRLRKWSTSTKS

SEQ ID NO: 30210 - protein, 16 aa, Homo sapiens
  ( 280 )...( 295 ): >Z335_HUMAN
GKKGRLRKWSTSTKSQ

SEQ ID NO: 30211 - protein, 16 aa, Homo sapiens
  ( 329 )...( 344 ): >Z335_HUMAN
EPRGRQLRLQRPTPST

SEQ ID NO: 30212 - protein, 16 aa, Homo sapiens
  ( 330 )...( 345 ): >Z335_HUMAN
PRGRQLRLQRPTPSTP

SEQ ID NO: 30213 - protein, 16 aa, Homo sapiens
  ( 332 )...( 347 ): >Z335_HUMAN
GRQLRLQRPTPSTPRP

SEQ ID NO: 30214 - protein, 16 aa, Homo sapiens
  ( 532 )...( 547 ): >Z335_HUMAN
SVYRKDVIRHAAVHSR

SEQ ID NO: 30215 - protein, 16 aa, Homo sapiens
  ( 565 )...( 580 ): >Z335_HUMAN
PVCGRVYPMQKRLTQH

SEQ ID NO: 30216 - protein, 16 aa, Homo sapiens
  ( 566 )...( 581 ): >Z335_HUMAN
VCGRVYPMQKRLTQHM

SEQ ID NO: 30217 - protein, 16 aa, Homo sapiens
  ( 568 )...( 583 ): >Z335_HUMAN
GRVYPMQKRLTQHMKT

SEQ ID NO: 30218 - protein, 16 aa, Homo sapiens
  ( 605 )...( 620 ): >Z335_HUMAN
FKMHLLTHIQAVANRR

SEQ ID NO: 30219 - protein, 16 aa, Homo sapiens
  ( 606 )...( 621 ): >Z335_HUMAN
KMHLLTHIQAVANRRF

SEQ ID NO: 30220 - protein, 16 aa, Homo sapiens
  ( 607 )...( 622 ): >Z335_HUMAN
MHLLTHIQAVANRRFK

SEQ ID NO: 30221 - protein, 16 aa, Homo sapiens
  ( 608 )...( 623 ): >Z335_HUMAN
HLLTHIQAVANRRFKC

SEQ ID NO: 30222 - protein, 16 aa, Homo sapiens
  ( 209 )...( 224 ): >Z336_HUMAN
KEVVKPPYPKIRRASG

SEQ ID NO: 30223 - protein, 16 aa, Homo sapiens
  ( 210 )...( 225 ): >Z336_HUMAN
EVVKPPYPKIRRASGR

SEQ ID NO: 30224 - protein, 16 aa, Homo sapiens
  ( 211 )...( 226 ): >Z336_HUMAN
VVKPPYPKIRRASGRL

SEQ ID NO: 30225 - protein, 16 aa, Homo sapiens
  ( 212 )...( 227 ): >Z336_HUMAN
VKPPYPKIRRASGRLA

SEQ ID NO: 30226 - protein, 16 aa, Homo sapiens
  ( 213 )...( 228 ): >Z336_HUMAN
KPPYPKIRRASGRLAG

SEQ ID NO: 30227 - protein, 16 aa, Homo sapiens
  ( 214 )...( 229 ): >Z336_HUMAN
PPYPKIRRASGRLAGR

SEQ ID NO: 30228 - protein, 16 aa, Homo sapiens
  ( 219 )...( 234 ): >Z336_HUMAN
IRRASGRLAGRKVFVE

SEQ ID NO: 30229 - protein, 16 aa, Homo sapiens
  ( 220 )...( 235 ): >Z336_HUMAN
RRASGRLAGRKVFVEI

SEQ ID NO: 30230 - protein, 16 aa, Homo sapiens
  ( 221 )...( 236 ): >Z336_HUMAN
RASGRLAGRKVFVEIP

SEQ ID NO: 30231 - protein, 16 aa, Homo sapiens
  ( 222 )...( 237 ): >Z336_HUMAN
ASGRLAGRKVFVEIPK

SEQ ID NO: 30232 - protein, 16 aa, Homo sapiens
  ( 223 )...( 238 ): >Z336_HUMAN
SGRLAGRKVFVEIPKK

SEQ ID NO: 30233 - protein, 16 aa, Homo sapiens
  ( 224 )...( 239 ): >Z336_HUMAN
GRLAGRKVFVEIPKKK

SEQ ID NO: 30234 - protein, 16 aa, Homo sapiens
  ( 225 )...( 240 ): >Z336_HUMAN
RLAGRKVFVEIPKKKY

SEQ ID NO: 30235 - protein, 16 aa, Homo sapiens
  ( 226 )...( 241 ): >Z336_HUMAN
LAGRKVFVEIPKKKYT

SEQ ID NO: 30236 - protein, 16 aa, Homo sapiens
  ( 227 )...( 242 ): >Z336_HUMAN
AGRKVFVEIPKKKYTR

SEQ ID NO: 30237 - protein, 16 aa, Homo sapiens
  ( 378 )...( 393 ): >Z336_HUMAN
PCELCGKKFKRKKDVK

SEQ ID NO: 30238 - protein, 16 aa, Homo sapiens
  ( 90 )...( 105 ): >Z337_HUMAN
VLRPKNLGLAHQRQQQ

SEQ ID NO: 30239 - protein, 16 aa, Homo sapiens
  ( 135 )...( 150 ): >Z337_HUMAN
PPLRHAVSSRRRNSVV

SEQ ID NO: 30240 - protein, 16 aa, Homo sapiens
  ( 136 )...( 151 ): >Z337_HUMAN
PLRHAVSSRRRNSVVE

SEQ ID NO: 30241 - protein, 16 aa, Homo sapiens
  ( 137 )...( 152 ): >Z337_HUMAN
LRHAVSSRRRNSVVEI

SEQ ID NO: 30242 - protein, 16 aa, Homo sapiens
  ( 192 )...( 207 ): >Z337_HUMAN
KMMVIIHKKAHSRQKL

SEQ ID NO: 30243 - protein, 16 aa, Homo sapiens
  ( 194 )...( 209 ): >Z337_HUMAN
MVIIHKKAHSRQKLFT

SEQ ID NO: 30244 - protein, 16 aa, Homo sapiens
  ( 195 )...( 210 ): >Z337_HUMAN
VIIHKKAHSRQKLFTC

SEQ ID NO: 30245 - protein, 16 aa, Homo sapiens
  ( 241 )...( 256 ): >Z337_HUMAN
CGRGFSLKANLLRHQR

SEQ ID NO: 30246 - protein, 16 aa, Homo sapiens
  ( 242 )...( 257 ): >Z337_HUMAN
GRGFSLKANLLRHQRT

SEQ ID NO: 30247 - protein, 16 aa, Homo sapiens
  ( 326 )...( 341 ): >Z337_HUMAN
GRGYTNKSYFVVHKRI

SEQ ID NO: 30248 - protein, 16 aa, Homo sapiens
  ( 379 )...( 394 ): >Z337_HUMAN
RQCKQSFSVKGSLLRH

SEQ ID NO: 30249 - protein, 16 aa, Homo sapiens
  ( 381 )...( 396 ): >Z337_HUMAN
CKQSFSVKGSLLRHQR

SEQ ID NO: 30250 - protein, 16 aa, Homo sapiens
  ( 382 )...( 397 ): >Z337_HUMAN
KQSFSVKGSLLRHQRT

SEQ ID NO: 30251 - protein, 16 aa, Homo sapiens
  ( 465 )...( 480 ): >Z337_HUMAN
CGRGFIQKSTFTLHQR

SEQ ID NO: 30252 - protein, 16 aa, Homo sapiens
  ( 521 )...( 536 ): >Z337_HUMAN
CGRGFTLKPNLTIHQR

SEQ ID NO: 30253 - protein, 16 aa, Homo sapiens
  ( 522 )...( 537 ): >Z337_HUMAN
GRGFTLKPNLTIHQRT

SEQ ID NO: 30254 - protein, 16 aa, Homo sapiens
  ( 634 )...( 649 ): >Z337_HUMAN
GRGFNWKGNLLTHQRT

SEQ ID NO: 30255 - protein, 16 aa, Homo sapiens
  ( 732 )...( 747 ): >Z337_HUMAN
LKRHLREKRFCTGSVG

SEQ ID NO: 30256 - protein, 16 aa, Homo sapiens
  ( 733 )...( 748 ): >Z337_HUMAN
KRHLREKRFCTGSVGE

SEQ ID NO: 30257 - protein, 16 aa, Homo sapiens
  ( 229 )...( 244 ): >Z338_HUMAN
DVRCTMKANLKSHIRI

SEQ ID NO: 30258 - protein, 16 aa, Homo sapiens
  ( 230 )...( 245 ): >Z338_HUMAN
VRCTMKANLKSHIRIK

SEQ ID NO: 30259 - protein, 16 aa, Homo sapiens
  ( 236 )...( 251 ): >Z338_HUMAN
ANLKSHIRIKHTFKCL

SEQ ID NO: 30260 - protein, 16 aa, Homo sapiens
  ( 313 )...( 328 ): >Z338_HUMAN
TKRPSSLAKHVDKVHR

SEQ ID NO: 30261 - protein, 16 aa, Homo sapiens
  ( 347 )...( 362 ): >Z338_HUMAN
GSSQHVAKIVTQRAFR

SEQ ID NO: 30262 - protein, 16 aa, Homo sapiens
  ( 348 )...( 363 ): >Z338_HUMAN
SSQHVAKIVTQRAFRC

SEQ ID NO: 30263 - protein, 16 aa, Homo sapiens
  ( 1 )...( 16 ): >Z339_HUMAN
MPKVFLVKRRSLGVSV

SEQ ID NO: 30264 - protein, 16 aa, Homo sapiens
  ( 2 )...( 17 ): >Z339_HUMAN
PKVFLVKRRSLGVSVR

SEQ ID NO: 30265 - protein, 16 aa, Homo sapiens
  ( 3 )...( 18 ): >Z339_HUMAN
KVFLVKRRSLGVSVRS

SEQ ID NO: 30266 - protein, 16 aa, Homo sapiens
  ( 4 )...( 19 ): >Z339_HUMAN
VFLVKRRSLGVSVRSW

SEQ ID NO: 30267 - protein, 16 aa, Homo sapiens
  ( 5 )...( 20 ): >Z339_HUMAN
FLVKRRSLGVSVRSWD

SEQ ID NO: 30268 - protein, 16 aa, Homo sapiens
  ( 90 )...( 105 ): >Z339_HUMAN
PDGHLATKQRPVARSK

SEQ ID NO: 30269 - protein, 16 aa, Homo sapiens
  ( 91 )...( 106 ): >Z339_HUMAN
DGHLATKQRPVARSKI

SEQ ID NO: 30270 - protein, 16 aa, Homo sapiens
  ( 92 )...( 107 ): >Z339_HUMAN
GHLATKQRPVARSKIK

SEQ ID NO: 30271 - protein, 16 aa, Homo sapiens
  ( 93 )...( 108 ): >Z339_HUMAN
HLATKQRPVARSKIKF

SEQ ID NO: 30272 - protein, 16 aa, Homo sapiens
  ( 94 )...( 109 ): >Z339_HUMAN
LATKQRPVARSKIKFT

SEQ ID NO: 30273 - protein, 16 aa, Homo sapiens
  ( 95 )...( 110 ): >Z339_HUMAN
ATKQRPVARSKIKFTT

SEQ ID NO: 30274 - protein, 16 aa, Homo sapiens
  ( 96 )...( 111 ): >Z339_HUMAN
TKQRPVARSKIKFTTG

SEQ ID NO: 30275 - protein, 16 aa, Homo sapiens
  ( 97 )...( 112 ): >Z339_HUMAN
KQRPVARSKIKFTTGT

SEQ ID NO: 30276 - protein, 16 aa, Homo sapiens
  ( 98 )...( 113 ): >Z339_HUMAN
QRPVARSKIKFTTGTC

SEQ ID NO: 30277 - protein, 16 aa, Homo sapiens
  ( 123 )...( 138 ): >Z339_HUMAN
LCGKGFRLQRMLNRHL

SEQ ID NO: 30278 - protein, 16 aa, Homo sapiens
  ( 164 )...( 179 ): >Z339_HUMAN
RHVRTHTGIRPYKCNV

SEQ ID NO: 30279 - protein, 16 aa, Homo sapiens
  ( 239 )...( 254 ): >Z339_HUMAN
GSSFLKKTSKKLAALL

SEQ ID NO: 30280 - protein, 16 aa, Homo sapiens
  ( 240 )...( 255 ): >Z339_HUMAN
SSFLKKTSKKLAALLQ

SEQ ID NO: 30281 - protein, 16 aa, Homo sapiens
  ( 241 )...( 256 ): >Z339_HUMAN
SFLKKTSKKLAALLQG

SEQ ID NO: 30282 - protein, 16 aa, Homo sapiens
  ( 242 )...( 257 ): >Z339_HUMAN
FLKKTSKKLAALLQGK

SEQ ID NO: 30283 - protein, 16 aa, Homo sapiens
  ( 243 )...( 258 ): >Z339_HUMAN
LKKTSKKLAALLQGKL

SEQ ID NO: 30284 - protein, 16 aa, Homo sapiens
  ( 244 )...( 259 ): >Z339_HUMAN
KKTSKKLAALLQGKLT

SEQ ID NO: 30285 - protein, 16 aa, Homo sapiens
  ( 245 )...( 260 ): >Z339_HUMAN
KTSKKLAALLQGKLTS

SEQ ID NO: 30286 - protein, 16 aa, Homo sapiens
  ( 195 )...( 210 ): >Z341_HUMAN
VATFDSPATLKTRRAK

SEQ ID NO: 30287 - protein, 16 aa, Homo sapiens
  ( 198 )...( 213 ): >Z341_HUMAN
FDSPATLKTRRAKGAR

SEQ ID NO: 30288 - protein, 16 aa, Homo sapiens
  ( 199 )...( 214 ): >Z341_HUMAN
DSPATLKTRRAKGARG

SEQ ID NO: 30289 - protein, 16 aa, Homo sapiens
  ( 200 )...( 215 ): >Z341_HUMAN
SPATLKTRRAKGARGL

SEQ ID NO: 30290 - protein, 16 aa, Homo sapiens
  ( 201 )...( 216 ): >Z341_HUMAN
PATLKTRRAKGARGLP

SEQ ID NO: 30291 - protein, 16 aa, Homo sapiens
  ( 202 )...( 217 ): >Z341_HUMAN
ATLKTRRAKGARGLPE

SEQ ID NO: 30292 - protein, 16 aa, Homo sapiens
  ( 203 )...( 218 ): >Z341_HUMAN
TLKTRRAKGARGLPEA

SEQ ID NO: 30293 - protein, 16 aa, Homo sapiens
  ( 204 )...( 219 ): >Z341_HUMAN
LKTRRAKGARGLPEAA

SEQ ID NO: 30294 - protein, 16 aa, Homo sapiens
  ( 213 )...( 228 ): >Z341_HUMAN
RGLPEAAGKPKAQKLK

SEQ ID NO: 30295 - protein, 16 aa, Homo sapiens
  ( 275 )...( 290 ): >Z341_HUMAN
GRAFAQKSNVKKHMQT

SEQ ID NO: 30296 - protein, 16 aa, Homo sapiens
  ( 497 )...( 512 ): >Z341_HUMAN
ERYLRRHLPTHGSGGR

SEQ ID NO: 30297 - protein, 16 aa, Homo sapiens
  ( 499 )...( 514 ): >Z341_HUMAN
YLRRHLPTHGSGGRFK

SEQ ID NO: 30298 - protein, 16 aa, Homo sapiens
  ( 667 )...( 682 ): >Z341_HUMAN
QRRAAPRSCGSGGRKV

SEQ ID NO: 30299 - protein, 16 aa, Homo sapiens
  ( 1 )...( 16 ): >Z342_HUMAN
MSRRKAGSAPRRVEPA

SEQ ID NO: 30300 - protein, 16 aa, Homo sapiens
  ( 159 )...( 174 ): >Z342_HUMAN
CLRCGKQFTVAWKLLR

SEQ ID NO: 30301 - protein, 16 aa, Homo sapiens
  ( 160 )...( 175 ): >Z342_HUMAN
LRCGKQFTVAWKLLRH

SEQ ID NO: 30302 - protein, 16 aa, Homo sapiens
  ( 161 )...( 176 ): >Z342_HUMAN
RCGKQFTVAWKLLRHA

SEQ ID NO: 30303 - protein, 16 aa, Homo sapiens
  ( 162 )...( 177 ): >Z342_HUMAN
CGKQFTVAWKLLRHAQ

SEQ ID NO: 30304 - protein, 16 aa, Homo sapiens
  ( 428 )...( 443 ): >Z342_HUMAN
KLNRHRRMHGMTPGST

SEQ ID NO: 30305 - protein, 16 aa, Homo sapiens
  ( 452 )...( 467 ): >Z342_HUMAN
VPFGLRATLDKHLRQK

SEQ ID NO: 30306 - protein, 16 aa, Homo sapiens
  ( 208 )...( 223 ): >Z345_HUMAN
GKAFGSGSNLTQHRRI

SEQ ID NO: 30307 - protein, 16 aa, Homo sapiens
  ( 319 )...( 334 ): >Z345_HUMAN
CEKAFRSGSKLIQHQR

SEQ ID NO: 30308 - protein, 16 aa, Homo sapiens
  ( 172 )...( 187 ): >Z347_HUMAN
KRDARNKLIKNQLGLS

SEQ ID NO: 30309 - protein, 16 aa, Homo sapiens
  ( 173 )...( 188 ): >Z347_HUMAN
RDARNKLIKNQLGLSL

SEQ ID NO: 30310 - protein, 16 aa, Homo sapiens
  ( 175 )...( 190 ): >Z347_HUMAN
ARNKLIKNQLGLSLQS

SEQ ID NO: 30311 - protein, 16 aa, Homo sapiens
  ( 379 )...( 394 ): >Z347_HUMAN
GKAFRARSSLAIHQAT

SEQ ID NO: 30312 - protein, 16 aa, Homo sapiens
  ( 664 )...( 679 ): >Z347_HUMAN
QNSHLARHRRVHTGGK

SEQ ID NO: 30313 - protein, 16 aa, Homo sapiens
  ( 665 )...( 680 ): >Z347_HUMAN
NSHLARHRRVHTGGKP

SEQ ID NO: 30314 - protein, 16 aa, Homo sapiens
  ( 666 )...( 681 ): >Z347_HUMAN
SHLARHRRVHTGGKPY

SEQ ID NO: 30315 - protein, 16 aa, Homo sapiens
  ( 668 )...( 683 ): >Z347_HUMAN
LARHRRVHTGGKPYQC

SEQ ID NO: 30316 - protein, 16 aa, Homo sapiens
  ( 687 )...( 702 ): >Z347_HUMAN
GKAFSQTSKLARHQRV

SEQ ID NO: 30317 - protein, 16 aa, Homo sapiens
  ( 771 )...( 786 ): >Z347_HUMAN
GKAFSQTSKLARHQRI

SEQ ID NO: 30318 - protein, 16 aa, Homo sapiens
  ( 70 )...( 85 ): >Z358_HUMAN
GRAFRRSSGLSQHRRT

SEQ ID NO: 30319 - protein, 16 aa, Homo sapiens
  ( 126 )...( 141 ): >Z358_HUMAN
GKAFGWRSTLLKHRSS

SEQ ID NO: 30320 - protein, 16 aa, Homo sapiens
  ( 294 )...( 309 ): >Z358_HUMAN
GKAFGQASSLTKHKRV

SEQ ID NO: 30321 - protein, 16 aa, Homo sapiens
  ( 70 )...( 85 ): >Z366_HUMAN
VFEGAGSRKRKSMPTK

SEQ ID NO: 30322 - protein, 16 aa, Homo sapiens
  ( 460 )...( 475 ): >Z366_HUMAN
LLANMKRHVLIHTNIR

SEQ ID NO: 30323 - protein, 16 aa, Homo sapiens
  ( 461 )...( 476 ): >Z366_HUMAN
LANMKRHVLIHTNIRA

SEQ ID NO: 30324 - protein, 16 aa, Homo sapiens
  ( 539 )...( 554 ): >Z366_HUMAN
PSKFTLKGNLTRHMKV

SEQ ID NO: 30325 - protein, 16 aa, Homo sapiens
  ( 540 )...( 555 ): >Z366_HUMAN
SKFTLKGNLTRHMKVK

SEQ ID NO: 30326 - protein, 16 aa, Homo sapiens
  ( 541 )...( 556 ): >Z366_HUMAN
KFTLKGNLTRHMKVKH

SEQ ID NO: 30327 - protein, 16 aa, Homo sapiens
  ( 542 )...( 557 ): >Z366_HUMAN
FTLKGNLTRHMKVKHG

SEQ ID NO: 30328 - protein, 16 aa, Homo sapiens
  ( 543 )...( 558 ): >Z366_HUMAN
TLKGNLTRHMKVKHGV

SEQ ID NO: 30329 - protein, 16 aa, Homo sapiens
  ( 544 )...( 559 ): >Z366_HUMAN
LKGNLTRHMKVKHGVM

SEQ ID NO: 30330 - protein, 16 aa, Homo sapiens
  ( 593 )...( 608 ): >Z366_HUMAN
LSQKRRAKVPVFQSDG

SEQ ID NO: 30331 - protein, 16 aa, Homo sapiens
  ( 107 )...( 122 ): >Z382_HUMAN
KKLIKERSNIYGKTFT

SEQ ID NO: 30332 - protein, 16 aa, Homo sapiens
  ( 112 )...( 127 ): >Z382_HUMAN
ERSNIYGKTFTLGKNR

SEQ ID NO: 30333 - protein, 16 aa, Homo sapiens
  ( 113 )...( 128 ): >Z382_HUMAN
RSNIYGKTFTLGKNRI

SEQ ID NO: 30334 - protein, 16 aa, Homo sapiens
  ( 115 )...( 130 ): >Z382_HUMAN
NIYGKTFTLGKNRITI

SEQ ID NO: 30335 - protein, 16 aa, Homo sapiens
  ( 116 )...( 131 ): >Z382_HUMAN
IYGKTFTLGKNRITIL

SEQ ID NO: 30336 - protein, 16 aa, Homo sapiens
  ( 117 )...( 132 ): >Z382_HUMAN
YGKTFTLGKNRITILC

SEQ ID NO: 30337 - protein, 16 aa, Homo sapiens
  ( 221 )...( 236 ): >Z382_HUMAN
MKGMLFTHTRAHRGER

SEQ ID NO: 30338 - protein, 16 aa, Homo sapiens
  ( 355 )...( 370 ): >Z382_HUMAN
CGKSFRQKATLTRHHK

SEQ ID NO: 30339 - protein, 16 aa, Homo sapiens
  ( 356 )...( 371 ): >Z382_HUMAN
GKSFRQKATLTRHHKT

SEQ ID NO: 30340 - protein, 16 aa, Homo sapiens
  ( 467 )...( 482 ): >Z382_HUMAN
CGKSFRQKAILTVHHR

SEQ ID NO: 30341 - protein, 16 aa, Homo sapiens
  ( 468 )...( 483 ): >Z382_HUMAN
GKSFRQKAILTVHHRI

SEQ ID NO: 30342 - protein, 16 aa, Homo sapiens
  ( 496 )...( 511 ): >Z382_HUMAN
GKAFSRKSNLIRHQKT

SEQ ID NO: 30343 - protein, 16 aa, Homo sapiens
  ( 96 )...( 111 ): >Z384_HUMAN
TGLMTAGVSCSQRWRR

SEQ ID NO: 30344 - protein, 16 aa, Homo sapiens
  ( 102 )...( 117 ): >Z384_HUMAN
GVSCSQRWRREGSQSR

SEQ ID NO: 30345 - protein, 16 aa, Homo sapiens
  ( 103 )...( 118 ): >Z384_HUMAN
VSCSQRWRREGSQSRG

SEQ ID NO: 30346 - protein, 16 aa, Homo sapiens
  ( 106 )...( 121 ): >Z384_HUMAN
SQRWRREGSQSRGPGL

SEQ ID NO: 30347 - protein, 16 aa, Homo sapiens
  ( 107 )...( 122 ): >Z384_HUMAN
QRWRREGSQSRGPGLV

SEQ ID NO: 30348 - protein, 16 aa, Homo sapiens
  ( 108 )...( 123 ): >Z384_HUMAN
RWRREGSQSRGPGLVI

SEQ ID NO: 30349 - protein, 16 aa, Homo sapiens
  ( 189 )...( 204 ): >Z384_HUMAN
KPPRGRKKKRMLESGL

SEQ ID NO: 30350 - protein, 16 aa, Homo sapiens
  ( 190 )...( 205 ): >Z384_HUMAN
PPRGRKKKRMLESGLP

SEQ ID NO: 30351 - protein, 16 aa, Homo sapiens
  ( 191 )...( 206 ): >Z384_HUMAN
PRGRKKKRMLESGLPE

SEQ ID NO: 30352 - protein, 16 aa, Homo sapiens
  ( 192 )...( 207 ): >Z384_HUMAN
RGRKKKRMLESGLPEM

SEQ ID NO: 30353 - protein, 16 aa, Homo sapiens
  ( 193 )...( 208 ): >Z384_HUMAN
GRKKKRMLESGLPEMN

SEQ ID NO: 30354 - protein, 16 aa, Homo sapiens
  ( 191 )...( 206 ): >Z396_HUMAN
IKTTNVKSASRQKTSL

SEQ ID NO: 30355 - protein, 16 aa, Homo sapiens
  ( 192 )...( 207 ): >Z396_HUMAN
KTTNVKSASRQKTSLG

SEQ ID NO: 30356 - protein, 16 aa, Homo sapiens
  ( 284 )...( 299 ): >Z396_HUMAN
CAKAFSRSAILIQHRR

SEQ ID NO: 30357 - protein, 16 aa, Homo sapiens
  ( 285 )...( 300 ): >Z396_HUMAN
AKAFSRSAILIQHRRT

SEQ ID NO: 30358 - protein, 16 aa, Homo sapiens
  ( 309 )...( 324 ): >Z396_HUMAN
AIAEAQKNMYFKTRLK

SEQ ID NO: 30359 - protein, 16 aa, Homo sapiens
  ( 318 )...( 333 ): >Z396_HUMAN
YFKTRLKCPRSLSGGR

SEQ ID NO: 30360 - protein, 15 aa, Homo sapiens
  ( 319 )...( 334 ): >Z396_HUMAN
FKTRLKCPRSLSGGR

SEQ ID NO: 30361 - protein, 16 aa, Homo sapiens
  ( 319 )...( 334 ): >Z397_HUMAN
GKAFSLRSYLIIHQRI

SEQ ID NO: 30362 - protein, 16 aa, Homo sapiens
  ( 347 )...( 362 ): >Z397_HUMAN
GKAFNQSSALIRHRKI

SEQ ID NO: 30363 - protein, 16 aa, Homo sapiens
  ( 355 )...( 370 ): >Z397_HUMAN
ALIRHRKIHTGEKACK

SEQ ID NO: 30364 - protein, 16 aa, Homo sapiens
  ( 356 )...( 371 ): >Z397_HUMAN
LIRHRKIHTGEKACKC

SEQ ID NO: 30365 - protein, 16 aa, Homo sapiens
  ( 357 )...( 372 ): >Z397_HUMAN
IRHRKIHTGEKACKCN

SEQ ID NO: 30366 - protein, 16 aa, Homo sapiens
  ( 402 )...( 417 ): >Z397_HUMAN
CGKTFSQSSKLIRHQR

SEQ ID NO: 30367 - protein, 16 aa, Homo sapiens
  ( 403 )...( 418 ): >Z397_HUMAN
GKTFSQSSKLIRHQRI

SEQ ID NO: 30368 - protein, 16 aa, Homo sapiens
  ( 459 )...( 474 ): >Z397_HUMAN
GKAFSLSSNLIRHQRI

SEQ ID NO: 30369 - protein, 16 aa, Homo sapiens
  ( 486 )...( 501 ): >Z397_HUMAN
CGKTFKRSSALVQHQR

SEQ ID NO: 30370 - protein, 16 aa, Homo sapiens
  ( 487 )...( 502 ): >Z397_HUMAN
GKTFKRSSALVQHQRI

SEQ ID NO: 30371 - protein, 12 aa, Homo sapiens
  ( 523 )...( 538 ): >Z397_HUMAN
VLMRHQRVHTIK

SEQ ID NO: 30372 - protein, 16 aa, Homo sapiens
  ( 1 )...( 16 ): >ZF36_HUMAN
IPRERRPGRSVSASVA

SEQ ID NO: 30373 - protein, 16 aa, Homo sapiens
  ( 2 )...( 17 ): >ZF36_HUMAN
PRERRPGRSVSASVAL

SEQ ID NO: 30374 - protein, 16 aa, Homo sapiens
  ( 3 )...( 18 ): >ZF36_HUMAN
RERRPGRSVSASVALG

SEQ ID NO: 30375 - protein, 16 aa, Homo sapiens
  ( 30 )...( 45 ): >ZF64_HUMAN
PWVLDRKGAKKSQGLW

SEQ ID NO: 30376 - protein, 16 aa, Homo sapiens
  ( 31 )...( 46 ): >ZF64_HUMAN
WVLDRKGAKKSQGLWS

SEQ ID NO: 30377 - protein, 16 aa, Homo sapiens
  ( 183 )...( 198 ): >ZF64_HUMAN
GKAFSQSSVLSKHRRI

SEQ ID NO: 30378 - protein, 16 aa, Homo sapiens
  ( 294 )...( 309 ): >ZF64_HUMAN
CGKTFSVKRTLLQHQR

SEQ ID NO: 30379 - protein, 16 aa, Homo sapiens
  ( 295 )...( 310 ): >ZF64_HUMAN
GKTFSVKRTLLQHQRI

SEQ ID NO: 30380 - protein, 16 aa, Homo sapiens
  ( 306 )...( 321 ): >ZIC3_HUMAN
GKSFKAKYKLVNHIRV

SEQ ID NO: 30381 - protein, 16 aa, Homo sapiens
  ( 309 )...( 324 ): >ZIC3_HUMAN
FKAKYKLVNHIRVHTG

SEQ ID NO: 30382 - protein, 16 aa, Homo sapiens
  ( 335 )...( 350 ): >ZIC3_HUMAN
CGKIFARSENLKIHKR

SEQ ID NO: 30383 - protein, 16 aa, Homo sapiens
  ( 336 )...( 351 ): >ZIC3_HUMAN
GKIFARSENLKIHKRT

SEQ ID NO: 30384 - protein, 16 aa, Homo sapiens
  ( 339 )...( 354 ): >ZIM2_HUMAN
TQVALRRHERIHTGKK

SEQ ID NO: 30385 - protein, 16 aa, Homo sapiens
  ( 340 )...( 355 ): >ZIM2_HUMAN
QVALRRHERIHTGKKP

SEQ ID NO: 30386 - protein, 16 aa, Homo sapiens
  ( 371 )...( 386 ): >ZIM2_HUMAN
LNRHQKTHSGRKTSGC

SEQ ID NO: 30387 - protein, 16 aa, Homo sapiens
  ( 438 )...( 453 ): >ZIM2_HUMAN
RVLPPGLSHSKTYLIR

SEQ ID NO: 30388 - protein, 16 aa, Homo sapiens
  ( 152 )...( 167 ): >ZIM3_HUMAN
RKLVGNNPSKFVGQQL

SEQ ID NO: 30389 - protein, 16 aa, Homo sapiens
  ( 153 )...( 168 ): >ZIM3_HUMAN
KLVGNNPSKFVGQQLK

SEQ ID NO: 30390 - protein, 16 aa, Homo sapiens
  ( 368 )...( 383 ): >ZIM3_HUMAN
CGNTFIQKKNLIQHKK

SEQ ID NO: 30391 - protein, 16 aa, Homo sapiens
  ( 369 )...( 384 ): >ZIM3_HUMAN
GNTFIQKKNLIQHKKI

SEQ ID NO: 30392 - protein, 16 aa, Homo sapiens
  ( 416 )...( 431 ): >ZIM3_HUMAN
ERTYRCSECGKTFIRK

SEQ ID NO: 30393 - protein, 16 aa, Homo sapiens
  ( 417 )...( 432 ): >ZIM3_HUMAN
RTYRCSECGKTFIRKL

SEQ ID NO: 30394 - protein, 16 aa, Homo sapiens
  ( 424 )...( 439 ): >ZIM3_HUMAN
CGKTFIRKLNLSLHKK

SEQ ID NO: 30395 - protein, 16 aa, Homo sapiens
  ( 425 )...( 440 ): >ZIM3_HUMAN
GKTFIRKLNLSLHKKT

SEQ ID NO: 30396 - protein, 16 aa, Homo sapiens
  ( 430 )...( 445 ): >ZIM3_HUMAN
RKLNLSLHKKTHTGQK

SEQ ID NO: 30397 - protein, 16 aa, Homo sapiens
  ( 353 )...( 368 ): >ZN06_HUMAN
CDGINTNKVLKQKAKK

SEQ ID NO: 30398 - protein, 16 aa, Homo sapiens
  ( 354 )...( 369 ): >ZN06_HUMAN
DGINTNKVLKQKAKKR

SEQ ID NO: 30399 - protein, 16 aa, Homo sapiens
  ( 355 )...( 370 ): >ZN06_HUMAN
GINTNKVLKQKAKKRR

SEQ ID NO: 30400 - protein, 16 aa, Homo sapiens
  ( 368 )...( 383 ): >ZN06_HUMAN
KRRRGETRQWQTAVII

SEQ ID NO: 30401 - protein, 16 aa, Homo sapiens
  ( 369 )...( 384 ): >ZN06_HUMAN
RRRGETRQWQTAVIIG

SEQ ID NO: 30402 - protein, 16 aa, Homo sapiens
  ( 679 )...( 694 ): >ZN06_HUMAN
VHTKDQPLKCKRCKRG

SEQ ID NO: 30403 - protein, 16 aa, Homo sapiens
  ( 701 )...( 716 ): >ZN06_HUMAN
LKKHMKTHTGRKIYQC

SEQ ID NO: 30404 - protein, 16 aa, Homo sapiens
  ( 217 )...( 232 ): >ZN07_HUMAN
INTQKISRCQECQKKL

SEQ ID NO: 30405 - protein, 16 aa, Homo sapiens
  ( 256 )...( 271 ): >ZN07_HUMAN
GKVFRLCSQLNQHQRI

SEQ ID NO: 30406 - protein, 16 aa, Homo sapiens
  ( 283 )...( 298 ): >ZN07_HUMAN
CGKAFRLSSKLIQHQR

SEQ ID NO: 30407 - protein, 16 aa, Homo sapiens
  ( 284 )...( 299 ): >ZN07_HUMAN
GKAFRLSSKLIQHQRI

SEQ ID NO: 30408 - protein, 16 aa, Homo sapiens
  ( 339 )...( 354 ): >ZN07_HUMAN
CGKAFSQQSQLVRHQR

SEQ ID NO: 30409 - protein, 16 aa, Homo sapiens
  ( 340 )...( 355 ): >ZN07_HUMAN
GKAFSQQSQLVRHQRT

SEQ ID NO: 30410 - protein, 16 aa, Homo sapiens
  ( 447 )...( 462 ): >ZN07_HUMAN
TKAFGCSSRLIRHQRT

SEQ ID NO: 30411 - protein, 16 aa, Homo sapiens
  ( 448 )...( 463 ): >ZN07_HUMAN
KAFGCSSRLIRHQRTH

SEQ ID NO: 30412 - protein, 16 aa, Homo sapiens
  ( 617 )...( 632 ): >ZN07_HUMAN
EGSTFVSRKKVNTIKK

SEQ ID NO: 30413 - protein, 16 aa, Homo sapiens
  ( 618 )...( 633 ): >ZN07_HUMAN
GSTFVSRKKVNTIKKL

SEQ ID NO: 30414 - protein, 16 aa, Homo sapiens
  ( 619 )...( 634 ): >ZN07_HUMAN
STFVSRKKVNTIKKLH

SEQ ID NO: 30415 - protein, 16 aa, Homo sapiens
  ( 620 )...( 635 ): >ZN07_HUMAN
TFVSRKKVNTIKKLHQ

SEQ ID NO: 30416 - protein, 16 aa, Homo sapiens
  ( 621 )...( 636 ): >ZN07_HUMAN
FVSRKKVNTIKKLHQC

SEQ ID NO: 30417 - protein, 16 aa, Homo sapiens
  ( 622 )...( 637 ): >ZN07_HUMAN
VSRKKVNTIKKLHQCE

SEQ ID NO: 30418 - protein, 16 aa, Homo sapiens
  ( 668 )...( 683 ): >ZN07_HUMAN
GKAFNRSSRLTQHQKI

SEQ ID NO: 30419 - protein, 16 aa, Homo sapiens
  ( 315 )...( 330 ): >ZN08_HUMAN
GRAFNQNSSLGRHKRT

SEQ ID NO: 30420 - protein, 16 aa, Homo sapiens
  ( 371 )...( 386 ): >ZN08_HUMAN
GKGFRHSSSLAQHQRK

SEQ ID NO: 30421 - protein, 16 aa, Homo sapiens
  ( 221 )...( 236 ): >ZN10_HUMAN
GKSFVHSSRLIRHQRT

SEQ ID NO: 30422 - protein, 16 aa, Homo sapiens
  ( 359 )...( 374 ): >ZN10_HUMAN
QCGKAFIRKNDLIKHQ

SEQ ID NO: 30423 - protein, 16 aa, Homo sapiens
  ( 365 )...( 380 ): >ZN10_HUMAN
IRKNDLIKHQRIHVGA

SEQ ID NO: 30424 - protein, 16 aa, Homo sapiens
  ( 7 )...( 22 ): >ZN12_HUMAN
GKCFCRKSTLTTHLRT

SEQ ID NO: 30425 - protein, 16 aa, Homo sapiens
  ( 371 )...( 386 ): >ZN16_HUMAN
GKAFSQSAHLRKHQRV

SEQ ID NO: 30426 - protein, 16 aa, Homo sapiens
  ( 399 )...( 414 ): >ZN16_HUMAN
GKPFSRVSNLIKHHRV

SEQ ID NO: 30427 - protein, 16 aa, Homo sapiens
  ( 511 )...( 526 ): >ZN16_HUMAN
GKTFGRSSNLILHQRV

SEQ ID NO: 30428 - protein, 16 aa, Homo sapiens
  ( 622 )...( 637 ): >ZN16_HUMAN
CGKAFSQRSVLIQHQR

SEQ ID NO: 30429 - protein, 16 aa, Homo sapiens
  ( 623 )...( 638 ): >ZN16_HUMAN
GKAFSQRSVLIQHQRI

SEQ ID NO: 30430 - protein, 16 aa, Homo sapiens
  ( 650 )...( 665 ): >ZN16_HUMAN
CGKAFSQRSKLIKHQL

SEQ ID NO: 30431 - protein, 16 aa, Homo sapiens
  ( 651 )...( 666 ): >ZN16_HUMAN
GKAFSQRSKLIKHQLI

SEQ ID NO: 30432 - protein, 16 aa, Homo sapiens
  ( 14 )...( 29 ): >ZN19_HUMAN
GKAFVGNSPLLRHQKI

SEQ ID NO: 30433 - protein, 16 aa, Homo sapiens
  ( 137 )...( 152 ): >ZN24_HUMAN
PGQPVSLRRRKREVLV

SEQ ID NO: 30434 - protein, 16 aa, Homo sapiens
  ( 138 )...( 153 ): >ZN24_HUMAN
GQPVSLRRRKREVLVE

SEQ ID NO: 30435 - protein, 16 aa, Homo sapiens
  ( 285 )...( 300 ): >ZN24_HUMAN
GKAFSRSSILVQHQRV

SEQ ID NO: 30436 - protein, 15 aa, Homo sapiens
  ( 354 )...( 369 ): >ZN24_HUMAN
QRRHNAEKLLNVVKV

SEQ ID NO: 30437 - protein, 14 aa, Homo sapiens
  ( 355 )...( 370 ): >ZN24_HUMAN
RRHNAEKLLNVVKV

SEQ ID NO: 30438 - protein, 16 aa, Homo sapiens
  ( 51 )...( 66 ): >ZNFE_HUMAN
RNPINVMSVGKLLIRA

SEQ ID NO: 30439 - protein, 16 aa, Homo sapiens
  ( 58 )...( 73 ): >ZNFE_HUMAN
SVGKLLIRAQSLFYIR

SEQ ID NO: 30440 - protein, 16 aa, Homo sapiens
  ( 59 )...( 74 ): >ZNFE_HUMAN
VGKLLIRAQSLFYIRG

SEQ ID NO: 30441 - protein, 16 aa, Homo sapiens
  ( 60 )...( 75 ): >ZNFE_HUMAN
GKLLIRAQSLFYIRGF

SEQ ID NO: 30442 - protein, 16 aa, Homo sapiens
  ( 134 )...( 149 ): >ZNFE_HUMAN
VRNPMNVMNVGKPLVR

SEQ ID NO: 30443 - protein, 16 aa, Homo sapiens
  ( 142 )...( 157 ): >ZNFE_HUMAN
NVGKPLVRAPTLFFIR

SEQ ID NO: 30444 - protein, 16 aa, Homo sapiens
  ( 198 )...( 213 ): >ZNFE_HUMAN
SVIKVLVKAQTSLNIR

SEQ ID NO: 30445 - protein, 16 aa, Homo sapiens
  ( 218 )...( 233 ): >ZNFE_HUMAN
VKSLIIAIVVRKPSVR

SEQ ID NO: 30446 - protein, 16 aa, Homo sapiens
  ( 219 )...( 234 ): >ZNFE_HUMAN
KSLIIAIVVRKPSVRV

SEQ ID NO: 30447 - protein, 16 aa, Homo sapiens
  ( 226 )...( 241 ): >ZNFE_HUMAN
VVRKPSVRVLTLFFIR

SEQ ID NO: 30448 - protein, 16 aa, Homo sapiens
  ( 227 )...( 242 ): >ZNFE_HUMAN
VRKPSVRVLTLFFIRE

SEQ ID NO: 30449 - protein, 16 aa, Homo sapiens
  ( 284 )...( 299 ): >ZNFE_HUMAN
RKAFSQCSALTLHQRI

SEQ ID NO: 30450 - protein, 16 aa, Homo sapiens
  ( 175 )...( 190 ): >O14948
RWNKGTILKASVEYIK

SEQ ID NO: 30451 - protein, 16 aa, Homo sapiens
  ( 180 )...( 195 ): >Q9NY94
ITPGPHTKVVRRIFTN

SEQ ID NO: 30452 - protein, 16 aa, Homo sapiens
  ( 182 )...( 197 ): >Q9NY94
PGPHTKVVRRIFTNSR

SEQ ID NO: 30453 - protein, 16 aa, Homo sapiens
  ( 183 )...( 198 ): >Q9NY94
GPHTKVVRRIFTNSRE

SEQ ID NO: 30454 - protein, 16 aa, Homo sapiens
  ( 221 )...( 236 ): >Q9NY94
PDKKLSKNEILRLAMK

SEQ ID NO: 30455 - protein, 16 aa, Homo sapiens
  ( 223 )...( 238 ): >Q9NY94
KKLSKNEILRLAMKYI

SEQ ID NO: 30456 - protein, 16 aa, Homo sapiens
  ( 28 )...( 43 ): >Q8N100
TCAGAGRLESAARRRL

SEQ ID NO: 30457 - protein, 16 aa, Homo sapiens
  ( 31 )...( 46 ): >Q8N100
GAGRLESAARRRLAAN

SEQ ID NO: 30458 - protein, 16 aa, Homo sapiens
  ( 32 )...( 47 ): >Q8N100
AGRLESAARRRLAANA

SEQ ID NO: 30459 - protein, 16 aa, Homo sapiens
  ( 33 )...( 48 ): >Q8N100
GRLESAARRRLAANAR

SEQ ID NO: 30460 - protein, 16 aa, Homo sapiens
  ( 34 )...( 49 ): >Q8N100
RLESAARRRLAANARE

SEQ ID NO: 30461 - protein, 16 aa, Homo sapiens
  ( 35 )...( 50 ): >Q8N100
LESAARRRLAANARER

SEQ ID NO: 30462 - protein, 16 aa, Homo sapiens
  ( 43 )...( 58 ): >Q8N100
LAANARERRRMQGLNT

SEQ ID NO: 30463 - protein, 16 aa, Homo sapiens
  ( 44 )...( 59 ): >Q8N100
AANARERRRMQGLNTA

SEQ ID NO: 30464 - protein, 16 aa, Homo sapiens
  ( 52 )...( 67 ): >Q8N100
RMQGLNTAFDRLRRVV

SEQ ID NO: 30465 - protein, 16 aa, Homo sapiens
  ( 12 )...( 27 ): >Q9HAP2
RPRSRGRQVLLKPQVS

SEQ ID NO: 30466 - protein, 16 aa, Homo sapiens
  ( 13 )...( 28 ): >Q9HAP2
PRSRGRQVLLKPQVSE

SEQ ID NO: 30467 - protein, 16 aa, Homo sapiens
  ( 138 )...( 153 ): >Q9HAP2
SGKLVSPKWKNFKGLK

SEQ ID NO: 30468 - protein, 16 aa, Homo sapiens
  ( 139 )...( 154 ): >Q9HAP2
GKLVSPKWKNFKGLKL

SEQ ID NO: 30469 - protein, 16 aa, Homo sapiens
  ( 535 )...( 550 ): >Q9HAP2
RLTFVHPKPVSLTGGR

SEQ ID NO: 30470 - protein, 16 aa, Homo sapiens
  ( 542 )...( 557 ): >Q9HAP2
KPVSLTGGRPKQPHKI

SEQ ID NO: 30471 - protein, 16 aa, Homo sapiens
  ( 711 )...( 726 ): >Q9HAP2
PKNVAALKNRQMKHIS

SEQ ID NO: 30472 - protein, 16 aa, Homo sapiens
  ( 712 )...( 727 ): >Q9HAP2
KNVAALKNRQMKHISA

SEQ ID NO: 30473 - protein, 16 aa, Homo sapiens
  ( 900 )...( 915 ): >Q9HAP2
QLPEQASKAVTRIGKR

SEQ ID NO: 30474 - protein, 16 aa, Homo sapiens
  ( 901 )...( 916 ): >Q9HAP2
LPEQASKAVTRIGKRL

SEQ ID NO: 30475 - protein, 16 aa, Homo sapiens
  ( 902 )...( 917 ): >Q9HAP2
PEQASKAVTRIGKRLG

SEQ ID NO: 30476 - protein, 16 aa, Homo sapiens
  ( 904 )...( 919 ): >Q9HAP2
QASKAVTRIGKRLGES

SEQ ID NO: 30477 - protein, 16 aa, Homo sapiens
  ( 61 )...( 76 ): >Q8N6B6
RQLLLQQQTSGLKSPK

SEQ ID NO: 30478 - protein, 16 aa, Homo sapiens
  ( 85 )...( 100 ): >Q9NYQ5
QCNPMARKLDKLTVLR

SEQ ID NO: 30479 - protein, 16 aa, Homo sapiens
  ( 86 )...( 101 ): >Q9NYQ5
CNPMARKLDKLTVLRM

SEQ ID NO: 30480 - protein, 16 aa, Homo sapiens
  ( 87 )...( 102 ): >Q9NYQ5
NPMARKLDKLTVLRMA

SEQ ID NO: 30481 - protein, 16 aa, Homo sapiens
  ( 88 )...( 103 ): >Q9NYQ5
PMARKLDKLTVLRMAV

SEQ ID NO: 30482 - protein, 16 aa, Homo sapiens
  ( 89 )...( 104 ): >Q9NYQ5
MARKLDKLTVLRMAVQ

SEQ ID NO: 30483 - protein, 16 aa, Homo sapiens
  ( 90 )...( 105 ): >Q9NYQ5
ARKLDKLTVLRMAVQH

SEQ ID NO: 30484 - protein, 16 aa, Homo sapiens
  ( 91 )...( 106 ): >Q9NYQ5
RKLDKLTVLRMAVQHL

SEQ ID NO: 30485 - protein, 16 aa, Homo sapiens
  ( 92 )...( 107 ): >Q9NYQ5
KLDKLTVLRMAVQHLR

SEQ ID NO: 30486 - protein, 16 aa, Homo sapiens
  ( 95 )...( 110 ): >Q9NYQ5
KLTVLRMAVQHLRSLK

SEQ ID NO: 30487 - protein, 16 aa, Homo sapiens
  ( 96 )...( 111 ): >Q9NYQ5
LTVLRMAVQHLRSLKG

SEQ ID NO: 30488 - protein, 16 aa, Homo sapiens
  ( 97 )...( 112 ): >Q9NYQ5
TVLRMAVQHLRSLKGL

SEQ ID NO: 30489 - protein, 16 aa, Homo sapiens
  ( 98 )...( 113 ): >Q9NYQ5
VLRMAVQHLRSLKGLT

SEQ ID NO: 30490 - protein, 16 aa, Homo sapiens
  ( 99 )...( 114 ): >Q9NYQ5
LRMAVQHLRSLKGLTN

SEQ ID NO: 30491 - protein, 16 aa, Homo sapiens
  ( 100 )...( 115 ): >Q9NYQ5
RMAVQHLRSLKGLTNS

SEQ ID NO: 30492 - protein, 16 aa, Homo sapiens
  ( 150 )...( 165 ): >Q9NYQ5
RGKILFVSKSVSKILN

SEQ ID NO: 30493 - protein, 16 aa, Homo sapiens
  ( 214 )...( 229 ): >Q9NYQ5
SNLHAGRTRVYFGSRR

SEQ ID NO: 30494 - protein, 16 aa, Homo sapiens
  ( 215 )...( 230 ): >Q9NYQ5
NLHAGRTRVYFGSRRS

SEQ ID NO: 30495 - protein, 16 aa, Homo sapiens
  ( 216 )...( 231 ): >Q9NYQ5
LHAGRTRVYFGSRRSF

SEQ ID NO: 30496 - protein, 16 aa, Homo sapiens
  ( 281 )...( 296 ): >Q99718
KFLRSEAVAQLWGQKK

SEQ ID NO: 30497 - protein, 16 aa, Homo sapiens
  ( 282 )...( 297 ): >Q99718
FLRSEAVAQLWGQKKK

SEQ ID NO: 30498 - protein, 16 aa, Homo sapiens
  ( 283 )...( 298 ): >Q99718
LRSEAVAQLWGQKKKN

SEQ ID NO: 30499 - protein, 16 aa, Homo sapiens
  ( 284 )...( 299 ): >Q99718
RSEAVAQLWGQKKKNS

SEQ ID NO: 30500 - protein, 16 aa, Homo sapiens
  ( 288 )...( 303 ): >Q99718
VAQLWGQKKKNSNMTY

SEQ ID NO: 30501 - protein, 16 aa, Homo sapiens
  ( 318 )...( 333 ): >Q99718
ILERVDGRRLVYKFGK

SEQ ID NO: 30502 - protein, 16 aa, Homo sapiens
  ( 321 )...( 336 ): >Q99718
RVDGRRLVYKFGKNSS

SEQ ID NO: 30503 - protein, 16 aa, Homo sapiens
  ( 324 )...( 339 ): >Q99718
GRRLVYKFGKNSSGWK

SEQ ID NO: 30504 - protein, 16 aa, Homo sapiens
  ( 63 )...( 78 ): >Q96CY8
WKLCTPVLHRQSLMQK

SEQ ID NO: 30505 - protein, 16 aa, Homo sapiens
  ( 80 )...( 95 ): >Q96QX4
ELEAIKLIRFGKKKNT

SEQ ID NO: 30506 - protein, 16 aa, Homo sapiens
  ( 81 )...( 96 ): >Q96QX4
LEAIKLIRFGKKKNTH

SEQ ID NO: 30507 - protein, 16 aa, Homo sapiens
  ( 82 )...( 97 ): >Q96QX4
EAIKLIRFGKKKNTHS

SEQ ID NO: 30508 - protein, 16 aa, Homo sapiens
  ( 83 )...( 98 ): >Q96QX4
AIKLIRFGKKKNTHSL

SEQ ID NO: 30509 - protein, 16 aa, Homo sapiens
  ( 85 )...( 100 ): >Q96QX4
KLIRFGKKKNTHSLFV

SEQ ID NO: 30510 - protein, 16 aa, Homo sapiens
  ( 87 )...( 102 ): >Q96QX4
IRFGKKKNTHSLFVFI

SEQ ID NO: 30511 - protein, 16 aa, Homo sapiens
  ( 88 )...( 103 ): >Q96QX4
RFGKKKNTHSLFVFII

SEQ ID NO: 30512 - protein, 16 aa, Homo sapiens
  ( 220 )...( 235 ): >Q96QX4
CCEQLRTLLPYVKGRK

SEQ ID NO: 30513 - protein, 16 aa, Homo sapiens
  ( 221 )...( 236 ): >Q96QX4
CEQLRTLLPYVKGRKN

SEQ ID NO: 30514 - protein, 16 aa, Homo sapiens
  ( 223 )...( 238 ): >Q96QX4
QLRTLLPYVKGRKNDA

SEQ ID NO: 30515 - protein, 16 aa, Homo sapiens
  ( 224 )...( 239 ): >Q96QX4
LRTLLPYVKGRKNDAA

SEQ ID NO: 30516 - protein, 16 aa, Homo sapiens
  ( 225 )...( 240 ): >Q96QX4
RTLLPYVKGRKNDAAS

SEQ ID NO: 30517 - protein, 16 aa, Homo sapiens
  ( 121 )...( 136 ): >Q9UEC8
LDNLRKVVPCYSKTQK

SEQ ID NO: 30518 - protein, 16 aa, Homo sapiens
  ( 122 )...( 137 ): >Q9UEC8
DNLRKVVPCYSKTQKL

SEQ ID NO: 30519 - protein, 16 aa, Homo sapiens
  ( 123 )...( 138 ): >Q9UEC8
NLRKVVPCYSKTQKLS

SEQ ID NO: 30520 - protein, 16 aa, Homo sapiens
  ( 124 )...( 139 ): >Q9UEC8
LRKVVPCYSKTQKLSK

SEQ ID NO: 30521 - protein, 16 aa, Homo sapiens
  ( 125 )...( 140 ): >Q9UEC8
RKVVPCYSKTQKLSKI

SEQ ID NO: 30522 - protein, 16 aa, Homo sapiens
  ( 132 )...( 147 ): >Q9UEC8
SKTQKLSKIETLRLAK

SEQ ID NO: 30523 - protein, 16 aa, Homo sapiens
  ( 133 )...( 148 ): >Q9UEC8
KTQKLSKIETLRLAKN

SEQ ID NO: 30524 - protein, 16 aa, Homo sapiens
  ( 135 )...( 150 ): >Q9UEC8
QKLSKIETLRLAKNYI

SEQ ID NO: 30525 - protein, 16 aa, Homo sapiens
  ( 80 )...( 95 ): >Q9NX45
ELEAIKLIRFGKKKNT

SEQ ID NO: 30526 - protein, 16 aa, Homo sapiens
  ( 81 )...( 96 ): >Q9NX45
LEAIKLIRFGKKKNTH

SEQ ID NO: 30527 - protein, 16 aa, Homo sapiens
  ( 82 )...( 97 ): >Q9NX45
EAIKLIRFGKKKNTHS

SEQ ID NO: 30528 - protein, 16 aa, Homo sapiens
  ( 83 )...( 98 ): >Q9NX45
AIKLIRFGKKKNTHSL

SEQ ID NO: 30529 - protein, 16 aa, Homo sapiens
  ( 85 )...( 100 ): >Q9NX45
KLIRFGKKKNTHSLFV

SEQ ID NO: 30530 - protein, 16 aa, Homo sapiens
  ( 87 )...( 102 ): >Q9NX45
IRFGKKKNTHSLFVFI

SEQ ID NO: 30531 - protein, 16 aa, Homo sapiens
  ( 88 )...( 103 ): >Q9NX45
RFGKKKNTHSLFVFII

SEQ ID NO: 30532 - protein, 16 aa, Homo sapiens
  ( 220 )...( 235 ): >Q9NX45
CCEQLRTLLPYVKGRK

SEQ ID NO: 30533 - protein, 16 aa, Homo sapiens
  ( 221 )...( 236 ): >Q9NX45
CEQLRTLLPYVKGRKN

SEQ ID NO: 30534 - protein, 16 aa, Homo sapiens
  ( 223 )...( 238 ): >Q9NX45
QLRTLLPYVKGRKNDA

SEQ ID NO: 30535 - protein, 16 aa, Homo sapiens
  ( 224 )...( 239 ): >Q9NX45
LRTLLPYVKGRKNDAA

SEQ ID NO: 30536 - protein, 16 aa, Homo sapiens
  ( 225 )...( 240 ): >Q9NX45
RTLLPYVKGRKNDAAS

SEQ ID NO: 30537 - protein, 16 aa, Homo sapiens
  ( 122 )...( 137 ): >Q8WYA3
QCNPMARKLDKLTVLR

SEQ ID NO: 30538 - protein, 16 aa, Homo sapiens
  ( 123 )...( 138 ): >Q8WYA3
CNPMARKLDKLTVLRM

SEQ ID NO: 30539 - protein, 16 aa, Homo sapiens
  ( 124 )...( 139 ): >Q8WYA3
NPMARKLDKLTVLRMA

SEQ ID NO: 30540 - protein, 16 aa, Homo sapiens
  ( 125 )...( 140 ): >Q8WYA3
PMARKLDKLTVLRMAV

SEQ ID NO: 30541 - protein, 16 aa, Homo sapiens
  ( 126 )...( 141 ): >Q8WYA3
MARKLDKLTVLRMAVQ

SEQ ID NO: 30542 - protein, 16 aa, Homo sapiens
  ( 127 )...( 142 ): >Q8WYA3
ARKLDKLTVLRMAVQH

SEQ ID NO: 30543 - protein, 16 aa, Homo sapiens
  ( 128 )...( 143 ): >Q8WYA3
RKLDKLTVLRMAVQHL

SEQ ID NO: 30544 - protein, 16 aa, Homo sapiens
  ( 129 )...( 144 ): >Q8WYA3
KLDKLTVLRMAVQHLR

SEQ ID NO: 30545 - protein, 16 aa, Homo sapiens
  ( 132 )...( 147 ): >Q8WYA3
KLTVLRMAVQHLRSLK

SEQ ID NO: 30546 - protein, 16 aa, Homo sapiens
  ( 133 )...( 148 ): >Q8WYA3
LTVLRMAVQHLRSLKG

SEQ ID NO: 30547 - protein, 16 aa, Homo sapiens
  ( 134 )...( 149 ): >Q8WYA3
TVLRMAVQHLRSLKGL

SEQ ID NO: 30548 - protein, 16 aa, Homo sapiens
  ( 135 )...( 150 ): >Q8WYA3
VLRMAVQHLRSLKGLT

SEQ ID NO: 30549 - protein, 16 aa, Homo sapiens
  ( 136 )...( 151 ): >Q8WYA3
LRMAVQHLRSLKGLTN

SEQ ID NO: 30550 - protein, 16 aa, Homo sapiens
  ( 137 )...( 152 ): >Q8WYA3
RMAVQHLRSLKGLTNS

SEQ ID NO: 30551 - protein, 16 aa, Homo sapiens
  ( 187 )...( 202 ): >Q8WYA3
RGKILFVSKSVSKILN

SEQ ID NO: 30552 - protein, 16 aa, Homo sapiens
  ( 251 )...( 266 ): >Q8WYA3
SNLHAGRTRVYSGSRR

SEQ ID NO: 30553 - protein, 16 aa, Homo sapiens
  ( 252 )...( 267 ): >Q8WYA3
NLHAGRTRVYSGSRRS

SEQ ID NO: 30554 - protein, 16 aa, Homo sapiens
  ( 253 )...( 268 ): >Q8WYA3
LHAGRTRVYSGSRRSF

SEQ ID NO: 30555 - protein, 16 aa, Homo sapiens
  ( 254 )...( 269 ): >Q8WYA3
HAGRTRVYSGSRRSFF

SEQ ID NO: 30556 - protein, 16 aa, Homo sapiens
  ( 1 )...( 16 ): >Q8TAP5
MALGLQRARSTTELRK

SEQ ID NO: 30557 - protein, 16 aa, Homo sapiens
  ( 3 )...( 18 ): >Q8TAP5
LGLQRARSTTELRKEK

SEQ ID NO: 30558 - protein, 16 aa, Homo sapiens
  ( 4 )...( 19 ): >Q8TAP5
GLQRARSTTELRKEKS

SEQ ID NO: 30559 - protein, 16 aa, Homo sapiens
  ( 53 )...( 68 ): >Q8TAP5
KASIMRLTISYLRMHR

SEQ ID NO: 30560 - protein, 16 aa, Homo sapiens
  ( 54 )...( 69 ): >Q8TAP5
ASIMRLTISYLRMHRL

SEQ ID NO: 30561 - protein, 16 aa, Homo sapiens
  ( 55 )...( 70 ): >Q8TAP5
SIMRLTISYLRMHRLC

SEQ ID NO: 30562 - protein, 16 aa, Homo sapiens
  ( 56 )...( 71 ): >Q8TAP5
IMRLTISYLRMHRLCA

SEQ ID NO: 30563 - protein, 16 aa, Homo sapiens
  ( 57 )...( 72 ): >Q8TAP5
MRLTISYLRMHRLCAA

SEQ ID NO: 30564 - protein, 16 aa, Homo sapiens
  ( 58 )...( 73 ): >Q8TAP5
RLTISYLRMHRLCAAG

SEQ ID NO: 30565 - protein, 16 aa, Homo sapiens
  ( 144 )...( 159 ): >Q8TAP5
ALTPQQTLSRRKVEAR

SEQ ID NO: 30566 - protein, 16 aa, Homo sapiens
  ( 145 )...( 160 ): >Q8TAP5
LTPQQTLSRRKVEART

SEQ ID NO: 30567 - protein, 16 aa, Homo sapiens
  ( 148 )...( 163 ): >Q8TAP5
QQTLSRRKVEARTERC

SEQ ID NO: 30568 - protein, 16 aa, Homo sapiens
  ( 150 )...( 165 ): >Q8TAP5
TLSRRKVEARTERCFS

SEQ ID NO: 30569 - protein, 16 aa, Homo sapiens
  ( 151 )...( 166 ): >Q8TAP5
LSRRKVEARTERCFSL

SEQ ID NO: 30570 - protein, 16 aa, Homo sapiens
  ( 155 )...( 170 ): >Q8TAP5
KVEARTERCFSLRMKS

SEQ ID NO: 30571 - protein, 16 aa, Homo sapiens
  ( 158 )...( 173 ): >Q8TAP5
ARTERCFSLRMKSTLT

SEQ ID NO: 30572 - protein, 16 aa, Homo sapiens
  ( 159 )...( 174 ): >Q8TAP5
RTERCFSLRMKSTLTS

SEQ ID NO: 30573 - protein, 16 aa, Homo sapiens
  ( 160 )...( 175 ): >Q8TAP5
TERCFSLRMKSTLTSR

SEQ ID NO: 30574 - protein, 16 aa, Homo sapiens
  ( 161 )...( 176 ): >Q8TAP5
ERCFSLRMKSTLTSRG

SEQ ID NO: 30575 - protein, 16 aa, Homo sapiens
  ( 162 )...( 177 ): >Q8TAP5
RCFSLRMKSTLTSRGR

SEQ ID NO: 30576 - protein, 16 aa, Homo sapiens
  ( 163 )...( 178 ): >Q8TAP5
CFSLRMKSTLTSRGRT

SEQ ID NO: 30577 - protein, 16 aa, Homo sapiens
  ( 164 )...( 179 ): >Q8TAP5
FSLRMKSTLTSRGRTL

SEQ ID NO: 30578 - protein, 16 aa, Homo sapiens
  ( 165 )...( 180 ): >Q8TAP5
SLRMKSTLTSRGRTLN

SEQ ID NO: 30579 - protein, 16 aa, Homo sapiens
  ( 166 )...( 181 ): >Q8TAP5
LRMKSTLTSRGRTLNL

SEQ ID NO: 30580 - protein, 16 aa, Homo sapiens
  ( 167 )...( 182 ): >Q8TAP5
RMKSTLTSRGRTLNLK

SEQ ID NO: 30581 - protein, 16 aa, Homo sapiens
  ( 168 )...( 183 ): >Q8TAP5
MKSTLTSRGRTLNLKA

SEQ ID NO: 30582 - protein, 16 aa, Homo sapiens
  ( 169 )...( 184 ): >Q8TAP5
KSTLTSRGRTLNLKAA

SEQ ID NO: 30583 - protein, 16 aa, Homo sapiens
  ( 171 )...( 186 ): >Q8TAP5
TLTSRGRTLNLKAATW

SEQ ID NO: 30584 - protein, 16 aa, Homo sapiens
  ( 172 )...( 187 ): >Q8TAP5
LTSRGRTLNLKAATWK

SEQ ID NO: 30585 - protein, 16 aa, Homo sapiens
  ( 173 )...( 188 ): >Q8TAP5
TSRGRTLNLKAATWKV

SEQ ID NO: 30586 - protein, 16 aa, Homo sapiens
  ( 174 )...( 189 ): >Q8TAP5
SRGRTLNLKAATWKVL

SEQ ID NO: 30587 - protein, 16 aa, Homo sapiens
  ( 175 )...( 190 ): >Q8TAP5
RGRTLNLKAATWKVLN

SEQ ID NO: 30588 - protein, 16 aa, Homo sapiens
  ( 69 )...( 84 ): >Q8N0Y2 MEVAVPVKQEAEGLALDSPWHRFRRFHLGDAPGPREALGLLRALCRDWLRPEV
VLSKVCMYFTYKVRYT

SEQ ID NO: 30589 - protein, 16 aa, Homo sapiens
  ( 243 )...( 258 ): >Q8N0Y2 MEVAVPVKQEAEGLALDSPWHRFRRFHLGDAPGPREALGLLRALCRDWLRPEV
CGKTSLKPAHLLRHRQ

SEQ ID NO: 30590 - protein, 16 aa, Homo sapiens
  ( 244 )...( 259 ): >Q8N0Y2 MEVAVPVKQEAEGLALDSPWHRFRRFHLGDAPGPREALGLLRALCRDWLRPEV
GKTSLKPAHLLRHRQS

SEQ ID NO: 30591 - protein, 16 aa, Homo sapiens
  ( 342 )...( 357 ): >Q8N0Y2 MEVAVPVKQEAEGLALDSPWHRFRRFHLGDAPGPREALGLLRALCRDWLRPEV
CGKGFGRREHVLRHQR

SEQ ID NO: 30592 - protein, 16 aa, Homo sapiens
  ( 343 )...( 358 ): >Q8N0Y2 MEVAVPVKQEAEGLALDSPWHRFRRFHLGDAPGPREALGLLRALCRDWLRPEV
GKGFGRREHVLRHQRI

SEQ ID NO: 30593 - protein, 16 aa, Homo sapiens
  ( 349 )...( 364 ): >Q8N0Y2 MEVAVPVKQEAEGLALDSPWHRFRRFHLGDAPGPREALGLLRALCRDWLRPEV
REHVLRHQRIHGRAAA

SEQ ID NO: 30594 - protein, 16 aa, Homo sapiens
  ( 351 )...( 366 ): >Q8N0Y2 MEVAVPVKQEAEGLALDSPWHRFRRFHLGDAPGPREALGLLRALCRDWLRPEV
HVLRHQRIHGRAAASA

SEQ ID NO: 30595 - protein, 16 aa, Homo sapiens
  ( 352 )...( 367 ): >Q8N0Y2 MEVAVPVKQEAEGLALDSPWHRFRRFHLGDAPGPREALGLLRALCRDWLRPEV
VLRHQRIHGRAAASAQ

SEQ ID NO: 30596 - protein, 16 aa, Homo sapiens
  ( 353 )...( 368 ): >Q8N0Y2 MEVAVPVKQEAEGLALDSPWHRFRRFHLGDAPGPREALGLLRALCRDWLRPEV
LRHQRIHGRAAASAQG

SEQ ID NO: 30597 - protein, 16 aa, Homo sapiens
  ( 354 )...( 369 ): >Q8N0Y2 MEVAVPVKQEAEGLALDSPWHRFRRFHLGDAPGPREALGLLRALCRDWLRPEV
RHQRIHGRAAASAQGA

SEQ ID NO: 30598 - protein, 16 aa, Homo sapiens
  ( 1 )...( 16 ): >Q14211
MQLRKMQTVKKEQASL

SEQ ID NO: 30599 - protein, 16 aa, Homo sapiens
  ( 52 )...( 67 ): >Q14211
VGKNKSSACRRKREFI

SEQ ID NO: 30600 - protein, 16 aa, Homo sapiens
  ( 318 )...( 333 ): >Q14211
VNSSALPHKLRIKAKA

SEQ ID NO: 30601 - protein, 16 aa, Homo sapiens
  ( 320 )...( 335 ): >Q14211
SSALPHKLRIKAKAMQ

SEQ ID NO: 30602 - protein, 16 aa, Homo sapiens
  ( 321 )...( 336 ): >Q14211
SALPHKLRIKAKAMQI

SEQ ID NO: 30603 - protein, 16 aa, Homo sapiens
  ( 322 )...( 337 ): >Q14211
ALPHKLRIKAKAMQIK

SEQ ID NO: 30604 - protein, 16 aa, Homo sapiens
  ( 323 )...( 338 ): >Q14211
LPHKLRIKAKAMQIKV

SEQ ID NO: 30605 - protein, 16 aa, Homo sapiens
  ( 324 )...( 339 ): >Q14211
PHKLRIKAKAMQIKVE

SEQ ID NO: 30606 - protein, 16 aa, Homo sapiens
  ( 325 )...( 340 ): >Q14211
HKLRIKAKAMQIKVEA

SEQ ID NO: 30607 - protein, 16 aa, Homo sapiens
  ( 326 )...( 341 ): >Q14211
KLRIKAKAMQIKVEAF

SEQ ID NO: 30608 - protein, 16 aa, Homo sapiens
  ( 1 )...( 16 ): >Q96K34
MALGLQRARSTTELRK

SEQ ID NO: 30609 - protein, 16 aa, Homo sapiens
  ( 3 )...( 18 ): >Q96K34
LGLQRARSTTELRKEK

SEQ ID NO: 30610 - protein, 16 aa, Homo sapiens
  ( 4 )...( 19 ): >Q96K34
GLQRARSTTELRKEKS

SEQ ID NO: 30611 - protein, 16 aa, Homo sapiens
  ( 53 )...( 68 ): >Q96K34
KASIMRLTISYLRMHR

SEQ ID NO: 30612 - protein, 16 aa, Homo sapiens
  ( 54 )...( 69 ): >Q96K34
ASIMRLTISYLRMHRL

SEQ ID NO: 30613 - protein, 16 aa, Homo sapiens
  ( 55 )...( 70 ): >Q96K34
SIMRLTISYLRMHRLC

SEQ ID NO: 30614 - protein, 16 aa, Homo sapiens
  ( 56 )...( 71 ): >Q96K34
IMRLTISYLRMHRLCA

SEQ ID NO: 30615 - protein, 16 aa, Homo sapiens
  ( 57 )...( 72 ): >Q96K34
MRLTISYLRMHRLCAA

SEQ ID NO: 30616 - protein, 16 aa, Homo sapiens
  ( 58 )...( 73 ): >Q96K34
RLTISYLRMHRLCAAG

SEQ ID NO: 30617 - protein, 16 aa, Homo sapiens
  ( 160 )...( 175 ): >Q96K34
TERCFSLRMKSTLTSR

SEQ ID NO: 30618 - protein, 16 aa, Homo sapiens
  ( 161 )...( 176 ): >Q96K34
ERCFSLRMKSTLTSRG

SEQ ID NO: 30619 - protein, 16 aa, Homo sapiens
  ( 162 )...( 177 ): >Q96K34
RCFSLRMKSTLTSRGR

SEQ ID NO: 30620 - protein, 16 aa, Homo sapiens
  ( 163 )...( 178 ): >Q96K34
CFSLRMKSTLTSRGRT

SEQ ID NO: 30621 - protein, 16 aa, Homo sapiens
  ( 164 )...( 179 ): >Q96K34
FSLRMKSTLTSRGRTL

SEQ ID NO: 30622 - protein, 16 aa, Homo sapiens
  ( 165 )...( 180 ): >Q96K34
SLRMKSTLTSRGRTLN

SEQ ID NO: 30623 - protein, 16 aa, Homo sapiens
  ( 166 )...( 181 ): >Q96K34
LRMKSTLTSRGRTLNL

SEQ ID NO: 30624 - protein, 16 aa, Homo sapiens
  ( 167 )...( 182 ): >Q96K34
RMKSTLTSRGRTLNLK

SEQ ID NO: 30625 - protein, 16 aa, Homo sapiens
  ( 168 )...( 183 ): >Q96K34
MKSTLTSRGRTLNLKA

SEQ ID NO: 30626 - protein, 16 aa, Homo sapiens
  ( 169 )...( 184 ): >Q96K34
KSTLTSRGRTLNLKAA

SEQ ID NO: 30627 - protein, 16 aa, Homo sapiens
  ( 171 )...( 186 ): >Q96K34
TLTSRGRTLNLKAATW

SEQ ID NO: 30628 - protein, 16 aa, Homo sapiens
  ( 172 )...( 187 ): >Q96K34
LTSRGRTLNLKAATWK

SEQ ID NO: 30629 - protein, 16 aa, Homo sapiens
  ( 173 )...( 188 ): >Q96K34
TSRGRTLNLKAATWKV

SEQ ID NO: 30630 - protein, 16 aa, Homo sapiens
  ( 174 )...( 189 ): >Q96K34
SRGRTLNLKAATWKVL

SEQ ID NO: 30631 - protein, 16 aa, Homo sapiens
  ( 175 )...( 190 ): >Q96K34
RGRTLNLKAATWKVLN

SEQ ID NO: 30632 - protein, 16 aa, Homo sapiens
  ( 294 )...( 309 ): >Q96K34
LSKGQAVTGQYRFLAR

SEQ ID NO: 30633 - protein, 16 aa, Homo sapiens
  ( 295 )...( 310 ): >Q96K34
SKGQAVTGQYRFLARS

SEQ ID NO: 30634 - protein, 16 aa, Homo sapiens
  ( 296 )...( 311 ): >Q96K34
KGQAVTGQYRFLARSG

SEQ ID NO: 30635 - protein, 16 aa, Homo sapiens
  ( 407 )...( 422 ): >Q96K34
RRFCSPDLRRLLGPIL

SEQ ID NO: 30636 - protein, 16 aa, Homo sapiens
  ( 30 )...( 45 ): >O43392
IQGGGAIVQRAIKRRP

SEQ ID NO: 30637 - protein, 16 aa, Homo sapiens
  ( 31 )...( 46 ): >O43392
QGGGAIVQRAIKRRPG

SEQ ID NO: 30638 - protein, 16 aa, Homo sapiens
  ( 33 )...( 48 ): >O43392
GGAIVQRAIKRRPGLD

SEQ ID NO: 30639 - protein, 16 aa, Homo sapiens
  ( 34 )...( 49 ): >O43392
GAIVQRAIKRRPGLDF

SEQ ID NO: 30640 - protein, 16 aa, Homo sapiens
  ( 118 )...( 133 ): >O43392
TCSALARKPDKLTILR

SEQ ID NO: 30641 - protein, 16 aa, Homo sapiens
  ( 119 )...( 134 ): >O43392
CSALARKPDKLTILRM

SEQ ID NO: 30642 - protein, 16 aa, Homo sapiens
  ( 120 )...( 135 ): >O43392
SALARKPDKLTILRMA

SEQ ID NO: 30643 - protein, 16 aa, Homo sapiens
  ( 121 )...( 136 ): >O43392
ALARKPDKLTILRMAV

SEQ ID NO: 30644 - protein, 16 aa, Homo sapiens
  ( 122 )...( 137 ): >O43392
LARKPDKLTILRMAVS

SEQ ID NO: 30645 - protein, 16 aa, Homo sapiens
  ( 123 )...( 138 ): >O43392
ARKPDKLTILRMAVSH

SEQ ID NO: 30646 - protein, 16 aa, Homo sapiens
  ( 124 )...( 139 ): >O43392
RKPDKLTILRMAVSHM

SEQ ID NO: 30647 - protein, 16 aa, Homo sapiens
  ( 128 )...( 143 ): >O43392
KLTILRMAVSHMKSLR

SEQ ID NO: 30648 - protein, 16 aa, Homo sapiens
  ( 129 )...( 144 ): >O43392
LTILRMAVSHMKSLRG

SEQ ID NO: 30649 - protein, 16 aa, Homo sapiens
  ( 131 )...( 146 ): >O43392
ILRMAVSHMKSLRGTG

SEQ ID NO: 30650 - protein, 16 aa, Homo sapiens
  ( 132 )...( 147 ): >O43392
LRMAVSHMKSLRGTGN

SEQ ID NO: 30651 - protein, 16 aa, Homo sapiens
  ( 277 )...( 292 ): >O43392
VSVNRLSFVRNRCRNG

SEQ ID NO: 30652 - protein, 16 aa, Homo sapiens
  ( 279 )...( 294 ): >O43392
VNRLSFVRNRCRNGLG

SEQ ID NO: 30653 - protein, 16 aa, Homo sapiens
  ( 281 )...( 296 ): >O43392
RLSFVRNRCRNGLGSV

SEQ ID NO: 30654 - protein, 16 aa, Homo sapiens
  ( 282 )...( 297 ): >O43392
LSFVRNRCRNGLGSVK

SEQ ID NO: 30655 - protein, 16 aa, Homo sapiens
  ( 88 )...( 103 ): >Q8WYA1
QCNPMARKLDKLTVLR

SEQ ID NO: 30656 - protein, 16 aa, Homo sapiens
  ( 89 )...( 104 ): >Q8WYA1
CNPMARKLDKLTVLRM

SEQ ID NO: 30657 - protein, 16 aa, Homo sapiens
  ( 90 )...( 105 ): >Q8WYA1
NPMARKLDKLTVLRMA

SEQ ID NO: 30658 - protein, 16 aa, Homo sapiens
  ( 91 )...( 106 ): >Q8WYA1
PMARKLDKLTVLRMAV

SEQ ID NO: 30659 - protein, 16 aa, Homo sapiens
  ( 92 )...( 107 ): >Q8WYA1
MARKLDKLTVLRMAVQ

SEQ ID NO: 30660 - protein, 16 aa, Homo sapiens
  ( 93 )...( 108 ): >Q8WYA1
ARKLDKLTVLRMAVQH

SEQ ID NO: 30661 - protein, 16 aa, Homo sapiens
  ( 94 )...( 109 ): >Q8WYA1
RKLDKLTVLRMAVQHL

SEQ ID NO: 30662 - protein, 16 aa, Homo sapiens
  ( 95 )...( 110 ): >Q8WYA1
KLDKLTVLRMAVQHLR

SEQ ID NO: 30663 - protein, 16 aa, Homo sapiens
  ( 98 )...( 113 ): >Q8WYA1
KLTVLRMAVQHLRSLK

SEQ ID NO: 30664 - protein, 16 aa, Homo sapiens
  ( 99 )...( 114 ): >Q8WYA1
LTVLRMAVQHLRSLKG

SEQ ID NO: 30665 - protein, 16 aa, Homo sapiens
  ( 100 )...( 115 ): >Q8WYA1
TVLRMAVQHLRSLKGL

SEQ ID NO: 30666 - protein, 16 aa, Homo sapiens
  ( 101 )...( 116 ): >Q8WYA1
VLRMAVQHLRSLKGLT

SEQ ID NO: 30667 - protein, 16 aa, Homo sapiens
  ( 102 )...( 117 ): >Q8WYA1
LRMAVQHLRSLKGLTN

SEQ ID NO: 30668 - protein, 16 aa, Homo sapiens
  ( 103 )...( 118 ): >Q8WYA1
RMAVQHLRSLKGLTNS

SEQ ID NO: 30669 - protein, 16 aa, Homo sapiens
  ( 153 )...( 168 ): >Q8WYA1
RGKILFVSKSVSKILN

SEQ ID NO: 30670 - protein, 16 aa, Homo sapiens
  ( 217 )...( 232 ): >Q8WYA1
SNLHAGRTRVYSGSRR

SEQ ID NO: 30671 - protein, 16 aa, Homo sapiens
  ( 218 )...( 233 ): >Q8WYA1
NLHAGRTRVYSGSRRS

SEQ ID NO: 30672 - protein, 16 aa, Homo sapiens
  ( 219 )...( 234 ): >Q8WYA1
LHAGRTRVYSGSRRSF

SEQ ID NO: 30673 - protein, 16 aa, Homo sapiens
  ( 220 )...( 235 ): >Q8WYA1
HAGRTRVYSGSRRSFF

SEQ ID NO: 30674 - protein, 16 aa, Homo sapiens
  ( 55 )...( 70 ): >Q9UPB1
DKASVMRLTISYLRVR

SEQ ID NO: 30675 - protein, 16 aa, Homo sapiens
  ( 56 )...( 71 ): >Q9UPB1
KASVMRLTISYLRVRK

SEQ ID NO: 30676 - protein, 16 aa, Homo sapiens
  ( 57 )...( 72 ): >Q9UPB1
ASVMRLTISYLRVRKL

SEQ ID NO: 30677 - protein, 16 aa, Homo sapiens
  ( 58 )...( 73 ): >Q9UPB1
SVMRLTISYLRVRKLL

SEQ ID NO: 30678 - protein, 16 aa, Homo sapiens
  ( 59 )...( 74 ): >Q9UPB1
VMRLTISYLRVRKLLD

SEQ ID NO: 30679 - protein, 16 aa, Homo sapiens
  ( 60 )...( 75 ): >Q9UPB1
MRLTISYLRVRKLLDA

SEQ ID NO: 30680 - protein, 16 aa, Homo sapiens
  ( 61 )...( 76 ): >Q9UPB1
RLTISYLRVRKLLDAG

SEQ ID NO: 30681 - protein, 16 aa, Homo sapiens
  ( 144 )...( 159 ): >Q9UPB1
MREMLTHRNGLVKKGK

SEQ ID NO: 30682 - protein, 16 aa, Homo sapiens
  ( 145 )...( 160 ): >Q9UPB1
REMLTHRNGLVKKGKE

SEQ ID NO: 30683 - protein, 16 aa, Homo sapiens
  ( 150 )...( 165 ): >Q9UPB1
HRNGLVKKGKEQNTQR

SEQ ID NO: 30684 - protein, 16 aa, Homo sapiens
  ( 151 )...( 166 ): >Q9UPB1
RNGLVKKGKEQNTQRS

SEQ ID NO: 30685 - protein, 16 aa, Homo sapiens
  ( 152 )...( 167 ): >Q9UPB1
NGLVKKGKEQNTQRSF

SEQ ID NO: 30686 - protein, 16 aa, Homo sapiens
  ( 153 )...( 168 ): >Q9UPB1
GLVKKGKEQNTQRSFF

SEQ ID NO: 30687 - protein, 16 aa, Homo sapiens
  ( 154 )...( 169 ): >Q9UPB1
LVKKGKEQNTQRSFFL

SEQ ID NO: 30688 - protein, 16 aa, Homo sapiens
  ( 163 )...( 178 ): >Q9UPB1
TQRSFFLRMKCTLTSR

SEQ ID NO: 30689 - protein, 16 aa, Homo sapiens
  ( 164 )...( 179 ): >Q9UPB1
QRSFFLRMKCTLTSRG

SEQ ID NO: 30690 - protein, 16 aa, Homo sapiens
  ( 165 )...( 180 ): >Q9UPB1
RSFFLRMKCTLTSRGR

SEQ ID NO: 30691 - protein, 16 aa, Homo sapiens
  ( 166 )...( 181 ): >Q9UPB1
SFFLRMKCTLTSRGRT

SEQ ID NO: 30692 - protein, 16 aa, Homo sapiens
  ( 167 )...( 182 ): >Q9UPB1
FFLRMKCTLTSRGRTM

SEQ ID NO: 30693 - protein, 16 aa, Homo sapiens
  ( 168 )...( 183 ): >Q9UPB1
FLRMKCTLTSRGRTMN

SEQ ID NO: 30694 - protein, 16 aa, Homo sapiens
  ( 169 )...( 184 ): >Q9UPB1
LRMKCTLTSRGRTMNI

SEQ ID NO: 30695 - protein, 16 aa, Homo sapiens
  ( 170 )...( 185 ): >Q9UPB1
RMKCTLTSRGRTMNIK

SEQ ID NO: 30696 - protein, 16 aa, Homo sapiens
  ( 171 )...( 186 ): >Q9UPB1
MKCTLTSRGRTMNIKS

SEQ ID NO: 30697 - protein, 16 aa, Homo sapiens
  ( 172 )...( 187 ): >Q9UPB1
KCTLTSRGRTMNIKSA

SEQ ID NO: 30698 - protein, 16 aa, Homo sapiens
  ( 174 )...( 189 ): >Q9UPB1
TLTSRGRTMNIKSATW

SEQ ID NO: 30699 - protein, 16 aa, Homo sapiens
  ( 175 )...( 190 ): >Q9UPB1
LTSRGRTMNIKSATWK

SEQ ID NO: 30700 - protein, 16 aa, Homo sapiens
  ( 176 )...( 191 ): >Q9UPB1
TSRGRTMNIKSATWKV

SEQ ID NO: 30701 - protein, 16 aa, Homo sapiens
  ( 177 )...( 192 ): >Q9UPB1
SRGRTMNIKSATWKVL

SEQ ID NO: 30702 - protein, 16 aa, Homo sapiens
  ( 178 )...( 193 ): >Q9UPB1
RGRTMNIKSATWKVLH

SEQ ID NO: 30703 - protein, 16 aa, Homo sapiens
  ( 295 )...( 310 ): >Q9UPB1
FTKGQVTTGQYRMLAK

SEQ ID NO: 30704 - protein, 16 aa, Homo sapiens
  ( 296 )...( 311 ): >Q9UPB1
TKGQVTTGQYRMLAKR

SEQ ID NO: 30705 - protein, 16 aa, Homo sapiens
  ( 297 )...( 312 ): >Q9UPB1
KGQVTTGQYRMLAKRG

SEQ ID NO: 30706 - protein, 16 aa, Homo sapiens
  ( 299 )...( 314 ): >Q9UPB1
QVTTGQYRMLAKRGGY

SEQ ID NO: 30707 - protein, 16 aa, Homo sapiens
  ( 300 )...( 315 ): >Q9UPB1
VTTGQYRMLAKRGGYV

SEQ ID NO: 30708 - protein, 16 aa, Homo sapiens
  ( 301 )...( 316 ): >Q9UPB1
TTGQYRMLAKRGGYVW

SEQ ID NO: 30709 - protein, 16 aa, Homo sapiens
  ( 302 )...( 317 ): >Q9UPB1
TGQYRMLAKRGGYVWV

SEQ ID NO: 30710 - protein, 16 aa, Homo sapiens
  ( 72 )...( 87 ): >Q9NYQ4
QCNPMARKLDKLTVLR

SEQ ID NO: 30711 - protein, 16 aa, Homo sapiens
  ( 73 )...( 88 ): >Q9NYQ4
CNPMARKLDKLTVLRM

SEQ ID NO: 30712 - protein, 16 aa, Homo sapiens
  ( 74 )...( 89 ): >Q9NYQ4
NPMARKLDKLTVLRMA

SEQ ID NO: 30713 - protein, 16 aa, Homo sapiens
  ( 75 )...( 90 ): >Q9NYQ4
PMARKLDKLTVLRMAV

SEQ ID NO: 30714 - protein, 16 aa, Homo sapiens
  ( 76 )...( 91 ): >Q9NYQ4
MARKLDKLTVLRMAVQ

SEQ ID NO: 30715 - protein, 16 aa, Homo sapiens
  ( 77 )...( 92 ): >Q9NYQ4
ARKLDKLTVLRMAVQH

SEQ ID NO: 30716 - protein, 16 aa, Homo sapiens
  ( 78 )...( 93 ): >Q9NYQ4
RKLDKLTVLRMAVQHL

SEQ ID NO: 30717 - protein, 16 aa, Homo sapiens
  ( 79 )...( 94 ): >Q9NYQ4
KLDKLTVLRMAVQHLR

SEQ ID NO: 30718 - protein, 16 aa, Homo sapiens
  ( 82 )...( 97 ): >Q9NYQ4
KLTVLRMAVQHLRSLK

SEQ ID NO: 30719 - protein, 16 aa, Homo sapiens
  ( 83 )...( 98 ): >Q9NYQ4
LTVLRMAVQHLRSLKG

SEQ ID NO: 30720 - protein, 16 aa, Homo sapiens
  ( 84 )...( 99 ): >Q9NYQ4
TVLRMAVQHLRSLKGL

SEQ ID NO: 30721 - protein, 16 aa, Homo sapiens
  ( 85 )...( 100 ): >Q9NYQ4
VLRMAVQHLRSLKGLT

SEQ ID NO: 30722 - protein, 16 aa, Homo sapiens
  ( 86 )...( 101 ): >Q9NYQ4
LRMAVQHLRSLKGLTN

SEQ ID NO: 30723 - protein, 16 aa, Homo sapiens
  ( 87 )...( 102 ): >Q9NYQ4
RMAVQHLRSLKGLTNS

SEQ ID NO: 30724 - protein, 16 aa, Homo sapiens
  ( 137 )...( 152 ): >Q9NYQ4
RGKILFVSKSVSKILN

SEQ ID NO: 30725 - protein, 16 aa, Homo sapiens
  ( 201 )...( 216 ): >Q9NYQ4
SNLHAGRTRVYFGSRR

SEQ ID NO: 30726 - protein, 16 aa, Homo sapiens
  ( 202 )...( 217 ): >Q9NYQ4
NLHAGRTRVYFGSRRS

SEQ ID NO: 30727 - protein, 16 aa, Homo sapiens
  ( 203 )...( 218 ): >Q9NYQ4
LHAGRTRVYFGSRRSF

SEQ ID NO: 30728 - protein, 16 aa, Homo sapiens
  ( 13 )...( 28 ): >Q9ULI6
MIPPGECTYAGRKRRR

SEQ ID NO: 30729 - protein, 16 aa, Homo sapiens
  ( 16 )...( 31 ): >Q9ULI6
PGECTYAGRKRRRPLQ

SEQ ID NO: 30730 - protein, 16 aa, Homo sapiens
  ( 17 )...( 32 ): >Q9ULI6
GECTYAGRKRRRPLQK

SEQ ID NO: 30731 - protein, 16 aa, Homo sapiens
  ( 27 )...( 42 ): >Q9ULI6
RRPLQKQRPAVGAEKS

SEQ ID NO: 30732 - protein, 16 aa, Homo sapiens
  ( 28 )...( 43 ): >Q9ULI6
RPLQKQRPAVGAEKSN

SEQ ID NO: 30733 - protein, 16 aa, Homo sapiens
  ( 32 )...( 47 ): >Q9ULI6
KQRPAVGAEKSNPSKR

SEQ ID NO: 30734 - protein, 16 aa, Homo sapiens
  ( 72 )...( 87 ): >Q9ULI6
KLDKLSVLRLSVSYLR

SEQ ID NO: 30735 - protein, 16 aa, Homo sapiens
  ( 74 )...( 89 ): >Q9ULI6
DKLSVLRLSVSYLRVK

SEQ ID NO: 30736 - protein, 16 aa, Homo sapiens
  ( 75 )...( 90 ): >Q9ULI6
KLSVLRLSVSYLRVKS

SEQ ID NO: 30737 - protein, 16 aa, Homo sapiens
  ( 76 )...( 91 ): >Q9ULI6
LSVLRLSVSYLRVKSF

SEQ ID NO: 30738 - protein, 16 aa, Homo sapiens
  ( 77 )...( 92 ): >Q9ULI6
SVLRLSVSYLRVKSFF

SEQ ID NO: 30739 - protein, 16 aa, Homo sapiens
  ( 78 )...( 93 ): >Q9ULI6
VLRLSVSYLRVKSFFQ

SEQ ID NO: 30740 - protein, 16 aa, Homo sapiens
  ( 79 )...( 94 ): >Q9ULI6
LRLSVSYLRVKSFFQV

SEQ ID NO: 30741 - protein, 16 aa, Homo sapiens
  ( 80 )...( 95 ): >Q9ULI6
RLSVSYLRVKSFFQVV

SEQ ID NO: 30742 - protein, 16 aa, Homo sapiens
  ( 266 )...( 281 ): >Q9ULI6
MTMQFQGKLKFLFGQK

SEQ ID NO: 30743 - protein, 16 aa, Homo sapiens
  ( 267 )...( 282 ): >Q9ULI6
TMQFQGKLKFLFGQKK

SEQ ID NO: 30744 - protein, 16 aa, Homo sapiens
  ( 269 )...( 284 ): >Q9ULI6
QFQGKLKFLFGQKKKA

SEQ ID NO: 30745 - protein, 16 aa, Homo sapiens
  ( 270 )...( 285 ): >Q9ULI6
FQGKLKFLFGQKKKAP

SEQ ID NO: 30746 - protein, 16 aa, Homo sapiens
  ( 271 )...( 286 ): >Q9ULI6
QGKLKFLFGQKKKAPS

SEQ ID NO: 30747 - protein, 16 aa, Homo sapiens
  ( 272 )...( 287 ): >Q9ULI6
GKLKFLFGQKKKAPSG

SEQ ID NO: 30748 - protein, 16 aa, Homo sapiens
  ( 273 )...( 288 ): >Q9ULI6
KLKFLFGQKKKAPSGA

SEQ ID NO: 30749 - protein, 16 aa, Homo sapiens
  ( 308 )...( 323 ): >Q9ULI6
AAEMKMRSALLRAKPR

SEQ ID NO: 30750 - protein, 16 aa, Homo sapiens
  ( 309 )...( 324 ): >Q9ULI6
AEMKMRSALLRAKPRA

SEQ ID NO: 30751 - protein, 16 aa, Homo sapiens
  ( 310 )...( 325 ): >Q9ULI6
EMKMRSALLRAKPRAD

SEQ ID NO: 30752 - protein, 16 aa, Homo sapiens
  ( 311 )...( 326 ): >Q9ULI6
MKMRSALLRAKPRADT

SEQ ID NO: 30753 - protein, 16 aa, Homo sapiens
  ( 312 )...( 327 ): >Q9ULI6
KMRSALLRAKPRADTA

SEQ ID NO: 30754 - protein, 16 aa, Homo sapiens
  ( 314 )...( 329 ): >Q9ULI6
RSALLRAKPRADTAAT

SEQ ID NO: 30755 - protein, 16 aa, Homo sapiens
  ( 406 )...( 421 ): >Q9ULI6
EQHRMLSRASGVTGRR

SEQ ID NO: 30756 - protein, 16 aa, Homo sapiens
  ( 407 )...( 422 ): >Q9ULI6
QHRMLSRASGVTGRRE

SEQ ID NO: 30757 - protein, 16 aa, Homo sapiens
  ( 408 )...( 423 ): >Q9ULI6
HRMLSRASGVTGRRET

SEQ ID NO: 30758 - protein, 16 aa, Homo sapiens
  ( 409 )...( 424 ): >Q9ULI6
RMLSRASGVTGRRETP

SEQ ID NO: 30759 - protein, 16 aa, Homo sapiens
  ( 413 )...( 428 ): >Q9ULI6
RASGVTGRRETPGPTK

SEQ ID NO: 30760 - protein, 16 aa, Homo sapiens
  ( 621 )...( 636 ): >Q9ULI6
VRGAQPHGRATAGRSR

SEQ ID NO: 30761 - protein, 16 aa, Homo sapiens
  ( 622 )...( 637 ): >Q9ULI6
RGAQPHGRATAGRSRE

SEQ ID NO: 30762 - protein, 16 aa, Homo sapiens
  ( 62 )...( 77 ): >Q8NFQ1
RQLLLQQQTSGLKSPK

SEQ ID NO: 30763 - protein, 16 aa, Homo sapiens
  ( 146 )...( 161 ): >Q8N6J9
RWNKGTILKASVEYIK

SEQ ID NO: 30764 - protein, 16 aa, Homo sapiens
  ( 59 )...( 74 ): >O43792
SLSVKPDKCKILKKTV

SEQ ID NO: 30765 - protein, 16 aa, Homo sapiens
  ( 66 )...( 81 ): >O43792
KCKILKKTVDQIQLMK

SEQ ID NO: 30766 - protein, 16 aa, Homo sapiens
  ( 67 )...( 82 ): >O43792
CKILKKTVDQIQLMKR

SEQ ID NO: 30767 - protein, 16 aa, Homo sapiens
  ( 68 )...( 83 ): >O43792
KILKKTVDQIQLMKRM

SEQ ID NO: 30768 - protein, 16 aa, Homo sapiens
  ( 243 )...( 258 ): >O43792
LICIARRLPRPPAITG

SEQ ID NO: 30769 - protein, 16 aa, Homo sapiens
  ( 244 )...( 259 ): >O43792
ICIARRLPRPPAITGV

SEQ ID NO: 30770 - protein, 16 aa, Homo sapiens
  ( 485 )...( 500 ): >O43792
QFMSPRRQVTSGLATR

SEQ ID NO: 30771 - protein, 16 aa, Homo sapiens
  ( 487 )...( 502 ): >O43792
MSPRRQVTSGLATRPR

SEQ ID NO: 30772 - protein, 16 aa, Homo sapiens
  ( 488 )...( 503 ): >O43792
SPRRQVTSGLATRPRM

SEQ ID NO: 30773 - protein, 16 aa, Homo sapiens
  ( 489 )...( 504 ): >O43792
PRRQVTSGLATRPRMP

SEQ ID NO: 30774 - protein, 16 aa, Homo sapiens
  ( 490 )...( 505 ): >O43792
RRQVTSGLATRPRMPN

SEQ ID NO: 30775 - protein, 16 aa, Homo sapiens
  ( 491 )...( 506 ): >O43792
RQVTSGLATRPRMPNN

SEQ ID NO: 30776 - protein, 16 aa, Homo sapiens
  ( 852 )...( 867 ): >O43792
ASLQSATARPTSRLNR

SEQ ID NO: 30777 - protein, 16 aa, Homo sapiens
  ( 853 )...( 868 ): >O43792
SLQSATARPTSRLNRL

SEQ ID NO: 30778 - protein, 16 aa, Homo sapiens
  ( 854 )...( 869 ): >O43792
LQSATARPTSRLNRLP

SEQ ID NO: 30779 - protein, 16 aa, Homo sapiens
  ( 49 )...( 64 ): >Q8WYR3
SSSMTSRILLRQQLMR

SEQ ID NO: 30780 - protein, 16 aa, Homo sapiens
  ( 366 )...( 381 ): >Q8NHD2
LKDRPARDGATVSRMK

SEQ ID NO: 30781 - protein, 16 aa, Homo sapiens
  ( 367 )...( 382 ): >Q8NHD2
KDRPARDGATVSRMKL

SEQ ID NO: 30782 - protein, 16 aa, Homo sapiens
  ( 369 )...( 384 ): >Q8NHD2
RPARDGATVSRMKLQV

SEQ ID NO: 30783 - protein, 16 aa, Homo sapiens
  ( 486 )...( 501 ): >Q8NHD2
TPFAIPRTSSLARAKR

SEQ ID NO: 30784 - protein, 16 aa, Homo sapiens
  ( 489 )...( 504 ): >Q8NHD2
AIPRTSSLARAKRPSV

SEQ ID NO: 30785 - protein, 16 aa, Homo sapiens
  ( 490 )...( 505 ): >Q8NHD2
IPRTSSLARAKRPSVS

SEQ ID NO: 30786 - protein, 16 aa, Homo sapiens
  ( 496 )...( 511 ): >Q8NHD2
LARAKRPSVSFAEGTK

SEQ ID NO: 30787 - protein, 16 aa, Homo sapiens
  ( 518 )...( 533 ): >Q8NHD2
RSSGELSSPLRKPKRL

SEQ ID NO: 30788 - protein, 16 aa, Homo sapiens
  ( 520 )...( 535 ): >Q8NHD2
SGELSSPLRKPKRLSR

SEQ ID NO: 30789 - protein, 16 aa, Homo sapiens
  ( 521 )...( 536 ): >Q8NHD2
GELSSPLRKPKRLSRG

SEQ ID NO: 30790 - protein, 16 aa, Homo sapiens
  ( 522 )...( 537 ): >Q8NHD2
ELSSPLRKPKRLSRGA

SEQ ID NO: 30791 - protein, 16 aa, Homo sapiens
  ( 523 )...( 538 ): >Q8NHD2
LSSPLRKPKRLSRGAQ

SEQ ID NO: 30792 - protein, 16 aa, Homo sapiens
  ( 524 )...( 539 ): >Q8NHD2
SSPLRKPKRLSRGAQS

SEQ ID NO: 30793 - protein, 16 aa, Homo sapiens
  ( 525 )...( 540 ): >Q8NHD2
SPLRKPKRLSRGAQSG

SEQ ID NO: 30794 - protein, 16 aa, Homo sapiens
  ( 526 )...( 541 ): >Q8NHD2
PLRKPKRLSRGAQSGP

SEQ ID NO: 30795 - protein, 16 aa, Homo sapiens
  ( 527 )...( 542 ): >Q8NHD2
LRKPKRLSRGAQSGPE

SEQ ID NO: 30796 - protein, 16 aa, Homo sapiens
  ( 528 )...( 543 ): >Q8NHD2
RKPKRLSRGAQSGPEG

SEQ ID NO: 30797 - protein, 16 aa, Homo sapiens
  ( 529 )...( 544 ): >Q8NHD2
KPKRLSRGAQSGPEGR

SEQ ID NO: 30798 - protein, 16 aa, Homo sapiens
  ( 626 )...( 641 ): >Q8NHD2
FGSFQKGQAEAKVKRA

SEQ ID NO: 30799 - protein, 16 aa, Homo sapiens
  ( 627 )...( 642 ): >Q8NHD2
GSFQKGQAEAKVKRAI

SEQ ID NO: 30800 - protein, 16 aa, Homo sapiens
  ( 628 )...( 643 ): >Q8NHD2
SFQKGQAEAKVKRAIP

SEQ ID NO: 30801 - protein, 16 aa, Homo sapiens
  ( 629 )...( 644 ): >Q8NHD2
FQKGQAEAKVKRAIPK

SEQ ID NO: 30802 - protein, 16 aa, Homo sapiens
  ( 630 )...( 645 ): >Q8NHD2
QKGQAEAKVKRAIPKP

SEQ ID NO: 30803 - protein, 16 aa, Homo sapiens
  ( 631 )...( 646 ): >Q8NHD2
KGQAEAKVKRAIPKPP

SEQ ID NO: 30804 - protein, 16 aa, Homo sapiens
  ( 632 )...( 647 ): >Q8NHD2
GQAEAKVKRAIPKPPR

SEQ ID NO: 30805 - protein, 16 aa, Homo sapiens
  ( 633 )...( 648 ): >Q8NHD2
QAEAKVKRAIPKPPRQ

SEQ ID NO: 30806 - protein, 16 aa, Homo sapiens
  ( 634 )...( 649 ): >Q8NHD2
AEAKVKRAIPKPPRQA

SEQ ID NO: 30807 - protein, 16 aa, Homo sapiens
  ( 635 )...( 650 ): >Q8NHD2
EAKVKRAIPKPPRQAL

SEQ ID NO: 30808 - protein, 16 aa, Homo sapiens
  ( 636 )...( 651 ): >Q8NHD2
AKVKRAIPKPPRQALN

SEQ ID NO: 30809 - protein, 16 aa, Homo sapiens
  ( 641 )...( 656 ): >Q8NHD2
AIPKPPRQALNRKKGS

SEQ ID NO: 30810 - protein, 16 aa, Homo sapiens
  ( 644 )...( 659 ): >Q8NHD2
KPPRQALNRKKGSPGL

SEQ ID NO: 30811 - protein, 16 aa, Homo sapiens
  ( 38 )...( 53 ): >Q8NAM2
SMSPTTSSQILARKRR

SEQ ID NO: 30812 - protein, 16 aa, Homo sapiens
  ( 39 )...( 54 ): >Q8NAM2
MSPTTSSQILARKRRR

SEQ ID NO: 30813 - protein, 16 aa, Homo sapiens
  ( 40 )...( 55 ): >Q8NAM2
SPTTSSQILARKRRRG

SEQ ID NO: 30814 - protein, 16 aa, Homo sapiens
  ( 41 )...( 56 ): >Q8NAM2
PTTSSQILARKRRRGI

SEQ ID NO: 30815 - protein, 16 aa, Homo sapiens
  ( 42 )...( 57 ): >Q8NAM2
TTSSQILARKRRRGII

SEQ ID NO: 30816 - protein, 16 aa, Homo sapiens
  ( 43 )...( 58 ): >Q8NAM2
TSSQILARKRRRGIIE

SEQ ID NO: 30817 - protein, 16 aa, Homo sapiens
  ( 44 )...( 59 ): >Q8NAM2
SSQILARKRRRGIIEK

SEQ ID NO: 30818 - protein, 16 aa, Homo sapiens
  ( 142 )...( 157 ): >O94945
RLTFVHPKPVSLTGGR

SEQ ID NO: 30819 - protein, 16 aa, Homo sapiens
  ( 149 )...( 164 ): >O94945
KPVSLTGGRPKQPHKI

SEQ ID NO: 30820 - protein, 16 aa, Homo sapiens
  ( 318 )...( 333 ): >O94945
PKNVAALKNRQMKHIS

SEQ ID NO: 30821 - protein, 16 aa, Homo sapiens
  ( 319 )...( 334 ): >O94945
KNVAALKNRQMKHISA

SEQ ID NO: 30822 - protein, 16 aa, Homo sapiens
  ( 507 )...( 522 ): >O94945
QLPEQASKAVTRIGKR

SEQ ID NO: 30823 - protein, 16 aa, Homo sapiens
  ( 508 )...( 523 ): >O94945
LPEQASKAVTRIGKRL

SEQ ID NO: 30824 - protein, 16 aa, Homo sapiens
  ( 509 )...( 524 ): >O94945
PEQASKAVTRIGKRLG

SEQ ID NO: 30825 - protein, 16 aa, Homo sapiens
  ( 511 )...( 526 ): >O94945
QASKAVTRIGKRLGES

SEQ ID NO: 30826 - protein, 16 aa, Homo sapiens
  ( 165 )...( 180 ): >O43372
IDVTVKKRQSLSTRKP

SEQ ID NO: 30827 - protein, 16 aa, Homo sapiens
  ( 166 )...( 181 ): >O43372
DVTVKKRQSLSTRKPV

SEQ ID NO: 30828 - protein, 16 aa, Homo sapiens
  ( 167 )...( 182 ): >O43372
VTVKKRQSLSTRKPVI

SEQ ID NO: 30829 - protein, 16 aa, Homo sapiens
  ( 168 )...( 183 ): >O43372
TVKKRQSLSTRKPVII

SEQ ID NO: 30830 - protein, 16 aa, Homo sapiens
  ( 169 )...( 184 ): >O43372
VKKRQSLSTRKPVIIA

SEQ ID NO: 30831 - protein, 16 aa, Homo sapiens
  ( 170 )...( 185 ): >O43372
KKRQSLSTRKPVIIAV

SEQ ID NO: 30832 - protein, 16 aa, Homo sapiens
  ( 171 )...( 186 ): >O43372
KRQSLSTRKPVIIAVR

SEQ ID NO: 30833 - protein, 16 aa, Homo sapiens
  ( 172 )...( 187 ): >O43372
RQSLSTRKPVIIAVRA

SEQ ID NO: 30834 - protein, 16 aa, Homo sapiens
  ( 51 )...( 66 ): >Q9Y2N7
KASIMRLTISYLRMHR

SEQ ID NO: 30835 - protein, 16 aa, Homo sapiens
  ( 52 )...( 67 ): >Q9Y2N7
ASIMRLTISYLRMHRL

SEQ ID NO: 30836 - protein, 16 aa, Homo sapiens
  ( 53 )...( 68 ): >Q9Y2N7
SIMRLTISYLRMHRLC

SEQ ID NO: 30837 - protein, 16 aa, Homo sapiens
  ( 54 )...( 69 ): >Q9Y2N7
IMRLTISYLRMHRLCA

SEQ ID NO: 30838 - protein, 16 aa, Homo sapiens
  ( 55 )...( 70 ): >Q9Y2N7
MRLTISYLRMHRLCAA

SEQ ID NO: 30839 - protein, 16 aa, Homo sapiens
  ( 56 )...( 71 ): >Q9Y2N7
RLTISYLRMHRLCAAG

SEQ ID NO: 30840 - protein, 16 aa, Homo sapiens
  ( 158 )...( 173 ): >Q9Y2N7
TERCFSLRMKSTLTSR

SEQ ID NO: 30841 - protein, 16 aa, Homo sapiens
  ( 159 )...( 174 ): >Q9Y2N7
ERCFSLRMKSTLTSRG

SEQ ID NO: 30842 - protein, 16 aa, Homo sapiens
  ( 160 )...( 175 ): >Q9Y2N7
RCFSLRMKSTLTSRGR

SEQ ID NO: 30843 - protein, 16 aa, Homo sapiens
  ( 161 )...( 176 ): >Q9Y2N7
CFSLRMKSTLTSRGRT

SEQ ID NO: 30844 - protein, 16 aa, Homo sapiens
  ( 162 )...( 177 ): >Q9Y2N7
FSLRMKSTLTSRGRTL

SEQ ID NO: 30845 - protein, 16 aa, Homo sapiens
  ( 163 )...( 178 ): >Q9Y2N7
SLRMKSTLTSRGRTLN

SEQ ID NO: 30846 - protein, 16 aa, Homo sapiens
  ( 164 )...( 179 ): >Q9Y2N7
LRMKSTLTSRGRTLNL

SEQ ID NO: 30847 - protein, 16 aa, Homo sapiens
  ( 165 )...( 180 ): >Q9Y2N7
RMKSTLTSRGRTLNLK

SEQ ID NO: 30848 - protein, 16 aa, Homo sapiens
  ( 166 )...( 181 ): >Q9Y2N7
MKSTLTSRGRTLNLKA

SEQ ID NO: 30849 - protein, 16 aa, Homo sapiens
  ( 167 )...( 182 ): >Q9Y2N7
KSTLTSRGRTLNLKAA

SEQ ID NO: 30850 - protein, 16 aa, Homo sapiens
  ( 169 )...( 184 ): >Q9Y2N7
TLTSRGRTLNLKAATW

SEQ ID NO: 30851 - protein, 16 aa, Homo sapiens
  ( 170 )...( 185 ): >Q9Y2N7
LTSRGRTLNLKAATWK

SEQ ID NO: 30852 - protein, 16 aa, Homo sapiens
  ( 171 )...( 186 ): >Q9Y2N7
TSRGRTLNLKAATWKV

SEQ ID NO: 30853 - protein, 16 aa, Homo sapiens
  ( 172 )...( 187 ): >Q9Y2N7
SRGRTLNLKAATWKVL

SEQ ID NO: 30854 - protein, 16 aa, Homo sapiens
  ( 173 )...( 188 ): >Q9Y2N7
RGRTLNLKAATWKVLN

SEQ ID NO: 30855 - protein, 16 aa, Homo sapiens
  ( 292 )...( 307 ): >Q9Y2N7
LSKGQAVTGQYRFLAR

SEQ ID NO: 30856 - protein, 16 aa, Homo sapiens
  ( 293 )...( 308 ): >Q9Y2N7
SKGQAVTGQYRFLARS

SEQ ID NO: 30857 - protein, 16 aa, Homo sapiens
  ( 294 )...( 309 ): >Q9Y2N7
KGQAVTGQYRFLARSG

SEQ ID NO: 30858 - protein, 16 aa, Homo sapiens
  ( 405 )...( 420 ): >Q9Y2N7
RRFCSPDLRRLLGPIL

SEQ ID NO: 30859 - protein, 16 aa, Homo sapiens
  ( 59 )...( 74 ): >O43793
SLSVKPDKCKILKKTV

SEQ ID NO: 30860 - protein, 16 aa, Homo sapiens
  ( 66 )...( 81 ): >O43793
KCKILKKTVDQIQLMK

SEQ ID NO: 30861 - protein, 16 aa, Homo sapiens
  ( 67 )...( 82 ): >O43793
CKILKKTVDQIQLMKR

SEQ ID NO: 30862 - protein, 16 aa, Homo sapiens
  ( 68 )...( 83 ): >O43793
KILKKTVDQIQLMKRM

SEQ ID NO: 30863 - protein, 16 aa, Homo sapiens
  ( 243 )...( 258 ): >O43793
LICIARRLPRPPAITG

SEQ ID NO: 30864 - protein, 16 aa, Homo sapiens
  ( 244 )...( 259 ): >O43793
ICIARRLPRPPAITGV

SEQ ID NO: 30865 - protein, 16 aa, Homo sapiens
  ( 485 )...( 500 ): >O43793
QFMSPRRQVTSGLATR

SEQ ID NO: 30866 - protein, 16 aa, Homo sapiens
  ( 487 )...( 502 ): >O43793
MSPRRQVTSGLATRPR

SEQ ID NO: 30867 - protein, 16 aa, Homo sapiens
  ( 488 )...( 503 ): >O43793
SPRRQVTSGLATRPRM

SEQ ID NO: 30868 - protein, 16 aa, Homo sapiens
  ( 489 )...( 504 ): >O43793
PRRQVTSGLATRPRMP

SEQ ID NO: 30869 - protein, 16 aa, Homo sapiens
  ( 490 )...( 505 ): >O43793
RRQVTSGLATRPRMPN

SEQ ID NO: 30870 - protein, 16 aa, Homo sapiens
  ( 491 )...( 506 ): >O43793
RQVTSGLATRPRMPNN

SEQ ID NO: 30871 - protein, 16 aa, Homo sapiens
  ( 852 )...( 867 ): >O43793
ASLQSATARPTSRLNR

SEQ ID NO: 30872 - protein, 16 aa, Homo sapiens
  ( 853 )...( 868 ): >O43793
SLQSATARPTSRLNRL

SEQ ID NO: 30873 - protein, 16 aa, Homo sapiens
  ( 854 )...( 869 ): >O43793
LQSATARPTSRLNRLP

SEQ ID NO: 30874 - protein, 16 aa, Homo sapiens
  ( 45 )...( 60 ): >Q9HCC6
RRRARINESLAQLKTL

SEQ ID NO: 30875 - protein, 16 aa, Homo sapiens
  ( 46 )...( 61 ): >Q9HCC6
RRARINESLAQLKTLI

SEQ ID NO: 30876 - protein, 16 aa, Homo sapiens
  ( 80 )...( 95 ): >Q9HCC6
ILEMTVRHLRSLRRVQ

SEQ ID NO: 30877 - protein, 16 aa, Homo sapiens
  ( 81 )...( 96 ): >Q9HCC6
LEMTVRHLRSLRRVQV

SEQ ID NO: 30878 - protein, 16 aa, Homo sapiens
  ( 82 )...( 97 ): >Q9HCC6
EMTVRHLRSLRRVQVT

SEQ ID NO: 30879 - protein, 16 aa, Homo sapiens
  ( 83 )...( 98 ): >Q9HCC6
MTVRHLRSLRRVQVTA

SEQ ID NO: 30880 - protein, 16 aa, Homo sapiens
  ( 84 )...( 99 ): >Q9HCC6
TVRHLRSLRRVQVTAA

SEQ ID NO: 30881 - protein, 16 aa, Homo sapiens
  ( 85 )...( 100 ): >Q9HCC6
VRHLRSLRRVQVTAAL

SEQ ID NO: 30882 - protein, 16 aa, Homo sapiens
  ( 86 )...( 101 ): >Q9HCC6
RHLRSLRRVQVTAALS

SEQ ID NO: 30883 - protein, 16 aa, Homo sapiens
  ( 87 )...( 102 ): >Q9HCC6
HLRSLRRVQVTAALSA

SEQ ID NO: 30884 - protein, 16 aa, Homo sapiens
  ( 135 )...( 150 ): >Q9HCC6
VRSRLLGHLAACLRQL

SEQ ID NO: 30885 - protein, 16 aa, Homo sapiens
  ( 136 )...( 151 ): >Q9HCC6
RSRLLGHLAACLRQLG

SEQ ID NO: 30886 - protein, 16 aa, Homo sapiens
  ( 140 )...( 155 ): >Q9HCC6
LGHLAACLRQLGPSRR

SEQ ID NO: 30887 - protein, 16 aa, Homo sapiens
  ( 51 )...( 66 ): >Q9NS70
QCNPMARKLDKLTVLR

SEQ ID NO: 30888 - protein, 16 aa, Homo sapiens
  ( 52 )...( 67 ): >Q9NS70
CNPMARKLDKLTVLRM

SEQ ID NO: 30889 - protein, 16 aa, Homo sapiens
  ( 53 )...( 68 ): >Q9NS70
NPMARKLDKLTVLRMA

SEQ ID NO: 30890 - protein, 16 aa, Homo sapiens
  ( 54 )...( 69 ): >Q9NS70
PMARKLDKLTVLRMAV

SEQ ID NO: 30891 - protein, 16 aa, Homo sapiens
  ( 55 )...( 70 ): >Q9NS70
MARKLDKLTVLRMAVQ

SEQ ID NO: 30892 - protein, 16 aa, Homo sapiens
  ( 56 )...( 71 ): >Q9NS70
ARKLDKLTVLRMAVQH

SEQ ID NO: 30893 - protein, 16 aa, Homo sapiens
  ( 57 )...( 72 ): >Q9NS70
RKLDKLTVLRMAVQHL

SEQ ID NO: 30894 - protein, 16 aa, Homo sapiens
  ( 58 )...( 73 ): >Q9NS70
KLDKLTVLRMAVQHLR

SEQ ID NO: 30895 - protein, 16 aa, Homo sapiens
  ( 61 )...( 76 ): >Q9NS70
KLTVLRMAVQHLRSLK

SEQ ID NO: 30896 - protein, 16 aa, Homo sapiens
  ( 62 )...( 77 ): >Q9NS70
LTVLRMAVQHLRSLKG

SEQ ID NO: 30897 - protein, 16 aa, Homo sapiens
  ( 63 )...( 78 ): >Q9NS70
TVLRMAVQHLRSLKGL

SEQ ID NO: 30898 - protein, 16 aa, Homo sapiens
  ( 64 )...( 79 ): >Q9NS70
VLRMAVQHLRSLKGLT

SEQ ID NO: 30899 - protein, 16 aa, Homo sapiens
  ( 65 )...( 80 ): >Q9NS70
LRMAVQHLRSLKGLTN

SEQ ID NO: 30900 - protein, 16 aa, Homo sapiens
  ( 66 )...( 81 ): >Q9NS70
RMAVQHLRSLKGLTNS

SEQ ID NO: 30901 - protein, 16 aa, Homo sapiens
  ( 116 )...( 131 ): >Q9NS70
RGKILFVSKSVSKILN

SEQ ID NO: 30902 - protein, 16 aa, Homo sapiens
  ( 180 )...( 195 ): >Q9NS70
SNLHAGRTRVYSGSRR

SEQ ID NO: 30903 - protein, 16 aa, Homo sapiens
  ( 181 )...( 196 ): >Q9NS70
NLHAGRTRVYSGSRRS

SEQ ID NO: 30904 - protein, 16 aa, Homo sapiens
  ( 182 )...( 197 ): >Q9NS70
LHAGRTRVYSGSRRSF

SEQ ID NO: 30905 - protein, 16 aa, Homo sapiens
  ( 183 )...( 198 ): >Q9NS70
HAGRTRVYSGSRRSFF

SEQ ID NO: 30906 - protein, 16 aa, Homo sapiens
  ( 74 )...( 89 ): >Q8N416
CRPARLLGLVHDCKRR

SEQ ID NO: 30907 - protein, 16 aa, Homo sapiens
  ( 75 )...( 90 ): >Q8N416
RPARLLGLVHDCKRRP

SEQ ID NO: 30908 - protein, 16 aa, Homo sapiens
  ( 77 )...( 92 ): >Q8N416
ARLLGLVHDCKRRPSR

SEQ ID NO: 30909 - protein, 16 aa, Homo sapiens
  ( 78 )...( 93 ): >Q8N416
RLLGLVHDCKRRPSRA

SEQ ID NO: 30910 - protein, 16 aa, Homo sapiens
  ( 79 )...( 94 ): >Q8N416
LLGLVHDCKRRPSRAR

SEQ ID NO: 30911 - protein, 16 aa, Homo sapiens
  ( 80 )...( 95 ): >Q8N416
LGLVHDCKRRPSRARA

SEQ ID NO: 30912 - protein, 16 aa, Homo sapiens
  ( 81 )...( 96 ): >Q8N416
GLVHDCKRRPSRARAV

SEQ ID NO: 30913 - protein, 16 aa, Homo sapiens
  ( 82 )...( 97 ): >Q8N416
LVHDCKRRPSRARAVS

SEQ ID NO: 30914 - protein, 16 aa, Homo sapiens
  ( 85 )...( 100 ): >Q8N416
DCKRRPSRARAVSRGA

SEQ ID NO: 30915 - protein, 16 aa, Homo sapiens
  ( 89 )...( 104 ): >Q8N416
RPSRARAVSRGAKTAE

SEQ ID NO: 30916 - protein, 16 aa, Homo sapiens
  ( 92 )...( 107 ): >Q8N416
RARAVSRGAKTAETVQ

SEQ ID NO: 30917 - protein, 16 aa, Homo sapiens
  ( 93 )...( 108 ): >Q8N416
ARAVSRGAKTAETVQR

SEQ ID NO: 30918 - protein, 16 aa, Homo sapiens
  ( 94 )...( 109 ): >Q8N416
RAVSRGAKTAETVQRI

SEQ ID NO: 30919 - protein, 16 aa, Homo sapiens
  ( 95 )...( 110 ): >Q8N416
AVSRGAKTAETVQRIK

SEQ ID NO: 30920 - protein, 16 aa, Homo sapiens
  ( 96 )...( 111 ): >Q8N416
VSRGAKTAETVQRIKK

SEQ ID NO: 30921 - protein, 16 aa, Homo sapiens
  ( 97 )...( 112 ): >Q8N416
SRGAKTAETVQRIKKT

SEQ ID NO: 30922 - protein, 16 aa, Homo sapiens
  ( 98 )...( 113 ): >Q8N416
RGAKTAETVQRIKKTR

SEQ ID NO: 30923 - protein, 16 aa, Homo sapiens
  ( 99 )...( 114 ): >Q8N416
GAKTAETVQRIKKTRR

SEQ ID NO: 30924 - protein, 16 aa, Homo sapiens
  ( 100 )...( 115 ): >Q8N416
AKTAETVQRIKKTRRL

SEQ ID NO: 30925 - protein, 16 aa, Homo sapiens
  ( 101 )...( 116 ): >Q8N416
KTAETVQRIKKTRRLK

SEQ ID NO: 30926 - protein, 16 aa, Homo sapiens
  ( 102 )...( 117 ): >Q8N416
TAETVQRIKKTRRLKA

SEQ ID NO: 30927 - protein, 16 aa, Homo sapiens
  ( 103 )...( 118 ): >Q8N416
AETVQRIKKTRRLKAN

SEQ ID NO: 30928 - protein, 16 aa, Homo sapiens
  ( 37 )...( 52 ): >Q8NI33
KPQMLKGELQTRPSQR

SEQ ID NO: 30929 - protein, 16 aa, Homo sapiens
  ( 40 )...( 55 ): >Q8NI33
MLKGELQTRPSQRPSR

SEQ ID NO: 30930 - protein, 16 aa, Homo sapiens
  ( 42 )...( 57 ): >Q8NI33
KGELQTRPSQRPSRKA

SEQ ID NO: 30931 - protein, 16 aa, Homo sapiens
  ( 226 )...( 241 ): >Q8NI33
CQIKVFCDKGAERKIR

SEQ ID NO: 30932 - protein, 16 aa, Homo sapiens
  ( 244 )...( 259 ): >Q8NI33
ERKQSKRKVSDVKVPL

SEQ ID NO: 30933 - protein, 16 aa, Homo sapiens
  ( 245 )...( 260 ): >Q8NI33
RKQSKRKVSDVKVPLL

SEQ ID NO: 30934 - protein, 16 aa, Homo sapiens
  ( 246 )...( 261 ): >Q8NI33
KQSKRKVSDVKVPLLP

SEQ ID NO: 30935 - protein, 16 aa, Homo sapiens
  ( 249 )...( 264 ): >Q8NI33
KRKVSDVKVPLLPSHK

SEQ ID NO: 30936 - protein, 16 aa, Homo sapiens
  ( 250 )...( 265 ): >Q8NI33
RKVSDVKVPLLPSHKR

SEQ ID NO: 30937 - protein, 16 aa, Homo sapiens
  ( 332 )...( 347 ): >Q8NI33
KLARIEEPKRVLLYVR

SEQ ID NO: 30938 - protein, 16 aa, Homo sapiens
  ( 333 )...( 348 ): >Q8NI33
LARIEEPKRVLLYVRK

SEQ ID NO: 30939 - protein, 16 aa, Homo sapiens
  ( 376 )...( 391 ): >Q8NI33
DVPHDKIGKIFKKCKK

SEQ ID NO: 30940 - protein, 16 aa, Homo sapiens
  ( 377 )...( 392 ): >Q8NI33
VPHDKIGKIFKKCKKG

SEQ ID NO: 30941 - protein, 16 aa, Homo sapiens
  ( 378 )...( 393 ): >Q8NI33
PHDKIGKIFKKCKKGI

SEQ ID NO: 30942 - protein, 16 aa, Homo sapiens
  ( 379 )...( 394 ): >Q8NI33
HDKIGKIFKKCKKGIL

SEQ ID NO: 30943 - protein, 16 aa, Homo sapiens
  ( 380 )...( 395 ): >Q8NI33
DKIGKIFKKCKKGILV

SEQ ID NO: 30944 - protein, 16 aa, Homo sapiens
  ( 381 )...( 396 ): >Q8NI33
KIGKIFKKCKKGILVN

SEQ ID NO: 30945 - protein, 16 aa, Homo sapiens
  ( 382 )...( 397 ): >Q8NI33
IGKIFKKCKKGILVNM

SEQ ID NO: 30946 - protein, 16 aa, Homo sapiens
  ( 383 )...( 398 ): >Q8NI33
GKIFKKCKKGILVNMD

SEQ ID NO: 30947 - protein, 16 aa, Homo sapiens
  ( 62 )...( 77 ): >Q9Y4E9
QADKLIGQKNLLTRKR

SEQ ID NO: 30948 - protein, 16 aa, Homo sapiens
  ( 63 )...( 78 ): >Q9Y4E9
ADKLIGQKNLLTRKRN

SEQ ID NO: 30949 - protein, 16 aa, Homo sapiens
  ( 64 )...( 79 ): >Q9Y4E9
DKLIGQKNLLTRKRNI

SEQ ID NO: 30950 - protein, 16 aa, Homo sapiens
  ( 65 )...( 80 ): >Q9Y4E9
KLIGQKNLLTRKRNIL

SEQ ID NO: 30951 - protein, 16 aa, Homo sapiens
  ( 66 )...( 81 ): >Q9Y4E9
LIGQKNLLTRKRNILI

SEQ ID NO: 30952 - protein, 16 aa, Homo sapiens
  ( 67 )...( 82 ): >Q9Y4E9
IGQKNLLTRKRNILIR

SEQ ID NO: 30953 - protein, 16 aa, Homo sapiens
  ( 71 )...( 86 ): >Q9Y4E9
NLLTRKRNILIRKVSS

SEQ ID NO: 30954 - protein, 16 aa, Homo sapiens
  ( 72 )...( 87 ): >Q9Y4E9
LLTRKRNILIRKVSSL

SEQ ID NO: 30955 - protein, 16 aa, Homo sapiens
  ( 73 )...( 88 ): >Q9Y4E9
LTRKRNILIRKVSSLS

SEQ ID NO: 30956 - protein, 16 aa, Homo sapiens
  ( 74 )...( 89 ): >Q9Y4E9
TRKRNILIRKVSSLSG

SEQ ID NO: 30957 - protein, 16 aa, Homo sapiens
  ( 75 )...( 90 ): >Q9Y4E9
RKRNILIRKVSSLSGK

SEQ ID NO: 30958 - protein, 16 aa, Homo sapiens
  ( 76 )...( 91 ): >Q9Y4E9
KRNILIRKVSSLSGKT

SEQ ID NO: 30959 - protein, 16 aa, Homo sapiens
  ( 77 )...( 92 ): >Q9Y4E9
RNILIRKVSSLSGKTE

SEQ ID NO: 30960 - protein, 16 aa, Homo sapiens
  ( 104 )...( 119 ): >Q9Y4E9
AKQQALEAQKRKKKMG

SEQ ID NO: 30961 - protein, 16 aa, Homo sapiens
  ( 105 )...( 120 ): >Q9Y4E9
KQQALEAQKRKKKMGS

SEQ ID NO: 30962 - protein, 16 aa, Homo sapiens
  ( 106 )...( 121 ): >Q9Y4E9
QQALEAQKRKKKMGSD

SEQ ID NO: 30963 - protein, 16 aa, Homo sapiens
  ( 143 )...( 158 ): >Q9Y4E9
LGQMFINNRRGKPLIL

SEQ ID NO: 30964 - protein, 16 aa, Homo sapiens
  ( 144 )...( 159 ): >Q9Y4E9
GQMFINNRRGKPLILS

SEQ ID NO: 30965 - protein, 16 aa, Homo sapiens
  ( 151 )...( 166 ): >Q9Y4E9
RRGKPLILSRKKDQAT

SEQ ID NO: 30966 - protein, 16 aa, Homo sapiens
  ( 152 )...( 167 ): >Q9Y4E9
RGKPLILSRKKDQATE

SEQ ID NO: 30967 - protein, 16 aa, Homo sapiens
  ( 283 )...( 298 ): >Q9Y4E9
KGRISSRGNRDGRVTL

SEQ ID NO: 30968 - protein, 16 aa, Homo sapiens
  ( 284 )...( 299 ): >Q9Y4E9
GRISSRGNRDGRVTLG

SEQ ID NO: 30969 - protein, 16 aa, Homo sapiens
  ( 285 )...( 300 ): >Q9Y4E9
RISSRGNRDGRVTLGP

SEQ ID NO: 30970 - protein, 16 aa, Homo sapiens
  ( 327 )...( 342 ): >Q9Y4E9
FLPKKISGDMRGIQYK

SEQ ID NO: 30971 - protein, 16 aa, Homo sapiens
  ( 328 )...( 343 ): >Q9Y4E9
LPKKISGDMRGIQYKW

SEQ ID NO: 30972 - protein, 16 aa, Homo sapiens
  ( 21 )...( 36 ): >Q9UMQ5
KRRSSSNTKAVTTFTI

SEQ ID NO: 30973 - protein, 16 aa, Homo sapiens
  ( 84 )...( 99 ): >Q9UMQ5
QKKIKSEASPRPLKSV

SEQ ID NO: 30974 - protein, 16 aa, Homo sapiens
  ( 85 )...( 100 ): >Q9UMQ5
KKIKSEASPRPLKSVI

SEQ ID NO: 30975 - protein, 16 aa, Homo sapiens
  ( 148 )...( 163 ): >Q9UMQ5
LVKNEKAAKVVILKKA

SEQ ID NO: 30976 - protein, 16 aa, Homo sapiens
  ( 149 )...( 164 ): >Q9UMQ5
VKNEKAAKVVILKKAT

SEQ ID NO: 30977 - protein, 16 aa, Homo sapiens
  ( 183 )...( 198 ): >Q9UMQ5
KLQARQQQLLKKIEHA

SEQ ID NO: 30978 - protein, 16 aa, Homo sapiens
  ( 185 )...( 200 ): >Q9UMQ5
QARQQQLLKKIEHART

SEQ ID NO: 30979 - protein, 16 aa, Homo sapiens
  ( 186 )...( 201 ): >Q9UMQ5
ARQQQLLKKIEHARTC

SEQ ID NO: 30980 - protein, 15 aa, Homo sapiens
  ( 187 )...( 202 ): >Q9UMQ5
RQQQLLKKIEHARTC

SEQ ID NO: 30981 - protein, 16 aa, Homo sapiens
  ( 142 )...( 157 ): >Q8WYA5
RLTFVHPKPVSLTGGR

SEQ ID NO: 30982 - protein, 16 aa, Homo sapiens
  ( 149 )...( 164 ): >Q8WYA5
KPVSLTGGRPKQPHKI

SEQ ID NO: 30983 - protein, 16 aa, Homo sapiens
  ( 318 )...( 333 ): >Q8WYA5
PKNVAALKNRQMKHIS

SEQ ID NO: 30984 - protein, 16 aa, Homo sapiens
  ( 319 )...( 334 ): >Q8WYA5
KNVAALKNRQMKHISA

SEQ ID NO: 30985 - protein, 16 aa, Homo sapiens
  ( 180 )...( 195 ): >Q16509
DGPHTKVVRRIFTNSR

SEQ ID NO: 30986 - protein, 16 aa, Homo sapiens
  ( 181 )...( 196 ): >Q16509
GPHTKVVRRIFTNSRE

SEQ ID NO: 30987 - protein, 16 aa, Homo sapiens
  ( 219 )...( 234 ): >Q16509
PDKKLSKNEILRLAMK

SEQ ID NO: 30988 - protein, 16 aa, Homo sapiens
  ( 221 )...( 236 ): >Q16509
KKLSKNEILRLAMKYI

SEQ ID NO: 30989 - protein, 16 aa, Homo sapiens
  ( 38 )...( 53 ): >Q96PR6
SMSPTTSSQILARKRR

SEQ ID NO: 30990 - protein, 16 aa, Homo sapiens
  ( 39 )...( 54 ): >Q96PR6
MSPTTSSQILARKRRR

SEQ ID NO: 30991 - protein, 16 aa, Homo sapiens
  ( 40 )...( 55 ): >Q96PR6
SPTTSSQILARKRRRG

SEQ ID NO: 30992 - protein, 16 aa, Homo sapiens
  ( 41 )...( 56 ): >Q96PR6
PTTSSQILARKRRRGI

SEQ ID NO: 30993 - protein, 16 aa, Homo sapiens
  ( 42 )...( 57 ): >Q96PR6
TTSSQILARKRRRGII

SEQ ID NO: 30994 - protein, 16 aa, Homo sapiens
  ( 43 )...( 58 ): >Q96PR6
TSSQILARKRRRGIIE

SEQ ID NO: 30995 - protein, 16 aa, Homo sapiens
  ( 44 )...( 59 ): >Q96PR6
SSQILARKRRRGIIEK

SEQ ID NO: 30996 - protein, 16 aa, Homo sapiens
  ( 72 )...( 87 ): >Q96PR6
LRRLVPSAFEKQGSAK

SEQ ID NO: 30997 - protein, 16 aa, Homo sapiens
  ( 73 )...( 88 ): >Q96PR6
RRLVPSAFEKQGSAKL

SEQ ID NO: 30998 - protein, 16 aa, Homo sapiens
  ( 183 )...( 198 ): >Q8WU35
CGKTSLKPAHLLRHRQ

SEQ ID NO: 30999 - protein, 16 aa, Homo sapiens
  ( 184 )...( 199 ): >Q8WU35
GKTSLKPAHLLRHRQS

SEQ ID NO: 31000 - protein, 16 aa, Homo sapiens
  ( 282 )...( 297 ): >Q8WU35
CGKGFGRREHVLRHQR

SEQ ID NO: 31001 - protein, 16 aa, Homo sapiens
  ( 283 )...( 298 ): >Q8WU35
GKGFGRREHVLRHQRI

SEQ ID NO: 31002 - protein, 16 aa, Homo sapiens
  ( 289 )...( 304 ): >Q8WU35
REHVLRHQRIHGRAAA

SEQ ID NO: 31003 - protein, 16 aa, Homo sapiens
  ( 291 )...( 306 ): >Q8WU35
HVLRHQRIHGRAAASA

SEQ ID NO: 31004 - protein, 16 aa, Homo sapiens
  ( 292 )...( 307 ): >Q8WU35
VLRHQRIHGRAAASAQ

SEQ ID NO: 31005 - protein, 16 aa, Homo sapiens
  ( 293 )...( 308 ): >Q8WU35
LRHQRIHGRAAASAQG

SEQ ID NO: 31006 - protein, 16 aa, Homo sapiens
  ( 294 )...( 309 ): >Q8WU35
RHQRIHGRAAASAQGA

SEQ ID NO: 31007 - protein, 16 aa, Homo sapiens
  ( 4 )...( 19 ): >Q8NEV2
VSLPPKENALFKRILR

SEQ ID NO: 31008 - protein, 16 aa, Homo sapiens
  ( 410 )...( 425 ): >Q8NEV2
LFLVKAKIYKHAGNIR

SEQ ID NO: 31009 - protein, 16 aa, Homo sapiens
  ( 411 )...( 426 ): >Q8NEV2
FLVKAKIYKHAGNIRE

SEQ ID NO: 31010 - protein, 16 aa, Homo sapiens
  ( 412 )...( 427 ): >Q8NEV2
LVKAKIYKHAGNIREA

SEQ ID NO: 31011 - protein, 16 aa, Homo sapiens
  ( 413 )...( 428 ): >Q8NEV2
VKAKIYKHAGNIREAA

SEQ ID NO: 31012 - protein, 16 aa, Homo sapiens
  ( 414 )...( 429 ): >Q8NEV2
KAKIYKHAGNIREAAR

SEQ ID NO: 31013 - protein, 16 aa, Homo sapiens
  ( 528 )...( 543 ): >Q8NEV2
YCMRKITLRSYVDLLK

SEQ ID NO: 31014 - protein, 16 aa, Homo sapiens
  ( 529 )...( 544 ): >Q8NEV2
CMRKITLRSYVDLLKL

SEQ ID NO: 31015 - protein, 16 aa, Homo sapiens
  ( 657 )...( 672 ): >Q8NEV2
AIKFLTPLKNLVKNKI

SEQ ID NO: 31016 - protein, 16 aa, Homo sapiens
  ( 685 )...( 700 ): >Q8NEV2
KEKFLLMLQSVKRAFA

SEQ ID NO: 31017 - protein, 16 aa, Homo sapiens
  ( 99 )...( 114 ): >Q8WYA2
QCNPMARKLDKLTVLR

SEQ ID NO: 31018 - protein, 16 aa, Homo sapiens
  ( 100 )...( 115 ): >Q8WYA2
CNPMARKLDKLTVLRM

SEQ ID NO: 31019 - protein, 16 aa, Homo sapiens
  ( 101 )...( 116 ): >Q8WYA2
NPMARKLDKLTVLRMA

SEQ ID NO: 31020 - protein, 16 aa, Homo sapiens
  ( 102 )...( 117 ): >Q8WYA2
PMARKLDKLTVLRMAV

SEQ ID NO: 31021 - protein, 16 aa, Homo sapiens
  ( 103 )...( 118 ): >Q8WYA2
MARKLDKLTVLRMAVQ

SEQ ID NO: 31022 - protein, 16 aa, Homo sapiens
  ( 104 )...( 119 ): >Q8WYA2
ARKLDKLTVLRMAVQH

SEQ ID NO: 31023 - protein, 16 aa, Homo sapiens
  ( 105 )...( 120 ): >Q8WYA2
RKLDKLTVLRMAVQHL

SEQ ID NO: 31024 - protein, 16 aa, Homo sapiens
  ( 106 )...( 121 ): >Q8WYA2
KLDKLTVLRMAVQHLR

SEQ ID NO: 31025 - protein, 16 aa, Homo sapiens
  ( 109 )...( 124 ): >Q8WYA2
KLTVLRMAVQHLRSLK

SEQ ID NO: 31026 - protein, 16 aa, Homo sapiens
  ( 110 )...( 125 ): >Q8WYA2
LTVLRMAVQHLRSLKG

SEQ ID NO: 31027 - protein, 16 aa, Homo sapiens
  ( 111 )...( 126 ): >Q8WYA2
TVLRMAVQHLRSLKGL

SEQ ID NO: 31028 - protein, 16 aa, Homo sapiens
  ( 112 )...( 127 ): >Q8WYA2
VLRMAVQHLRSLKGLT

SEQ ID NO: 31029 - protein, 16 aa, Homo sapiens
  ( 113 )...( 128 ): >Q8WYA2
LRMAVQHLRSLKGLTN

SEQ ID NO: 31030 - protein, 16 aa, Homo sapiens
  ( 114 )...( 129 ): >Q8WYA2
RMAVQHLRSLKGLTNS

SEQ ID NO: 31031 - protein, 16 aa, Homo sapiens
  ( 164 )...( 179 ): >Q8WYA2
RGKILFVSKSVSKILN

SEQ ID NO: 31032 - protein, 16 aa, Homo sapiens
  ( 228 )...( 243 ): >Q8WYA2
SNLHAGRTRVYSGSRR

SEQ ID NO: 31033 - protein, 16 aa, Homo sapiens
  ( 229 )...( 244 ): >Q8WYA2
NLHAGRTRVYSGSRRS

SEQ ID NO: 31034 - protein, 16 aa, Homo sapiens
  ( 230 )...( 245 ): >Q8WYA2
LHAGRTRVYSGSRRSF

SEQ ID NO: 31035 - protein, 16 aa, Homo sapiens
  ( 231 )...( 246 ): >Q8WYA2
HAGRTRVYSGSRRSFF

SEQ ID NO: 31036 - protein, 16 aa, Homo sapiens
  ( 58 )...( 73 ): >Q8N8Q0
RAGAKAAGESSKYKIK

SEQ ID NO: 31037 - protein, 16 aa, Homo sapiens
  ( 60 )...( 75 ): >Q8N8Q0
GAKAAGESSKYKIKKQ

SEQ ID NO: 31038 - protein, 16 aa, Homo sapiens
  ( 61 )...( 76 ): >Q8N8Q0
AKAAGESSKYKIKKQL

SEQ ID NO: 31039 - protein, 16 aa, Homo sapiens
  ( 62 )...( 77 ): >Q8N8Q0
KAAGESSKYKIKKQLS

SEQ ID NO: 31040 - protein, 16 aa, Homo sapiens
  ( 116 )...( 131 ): >Q8N8Q0
PSVRKLSKIATLLLAR

SEQ ID NO: 31041 - protein, 16 aa, Homo sapiens
  ( 117 )...( 132 ): >Q8N8Q0
SVRKLSKIATLLLARN

SEQ ID NO: 31042 - protein, 16 aa, Homo sapiens
  ( 118 )...( 133 ): >Q8N8Q0
VRKLSKIATLLLARNY

SEQ ID NO: 31043 - protein, 16 aa, Homo sapiens
  ( 119 )...( 134 ): >Q8N8Q0
RKLSKIATLLLARNYI

SEQ ID NO: 31044 - protein, 16 aa, Homo sapiens
  ( 120 )...( 135 ): >Q8N8Q0
KLSKIATLLLARNYIL

SEQ ID NO: 31045 - protein, 16 aa, Homo sapiens
  ( 86 )...( 101 ): >Q8WX40
RKRMSLSCERLRALLP

SEQ ID NO: 31046 - protein, 16 aa, Homo sapiens
  ( 87 )...( 102 ): >Q8WX40
KRMSLSCERLRALLPQ

SEQ ID NO: 31047 - protein, 16 aa, Homo sapiens
  ( 129 )...( 144 ): >Q8WX40
PSQEQHAVSCKGRRRQ

SEQ ID NO: 31048 - protein, 16 aa, Homo sapiens
  ( 133 )...( 148 ): >Q8WX40
QHAVSCKGRRRQSSGI

SEQ ID NO: 31049 - protein, 16 aa, Homo sapiens
  ( 134 )...( 149 ): >Q8WX40
HAVSCKGRRRQSSGIT

SEQ ID NO: 31050 - protein, 16 aa, Homo sapiens
  ( 135 )...( 150 ): >Q8WX40
AVSCKGRRRQSSGITV

SEQ ID NO: 31051 - protein, 16 aa, Homo sapiens
  ( 136 )...( 151 ): >Q8WX40
VSCKGRRRQSSGITVM

SEQ ID NO: 31052 - protein, 16 aa, Homo sapiens
  ( 137 )...( 152 ): >Q8WX40
SCKGRRRQSSGITVMG

SEQ ID NO: 31053 - protein, 16 aa, Homo sapiens
  ( 138 )...( 153 ): >Q8WX40
CKGRRRQSSGITVMGH

SEQ ID NO: 31054 - protein, 16 aa, Homo sapiens
  ( 139 )...( 154 ): >Q8WX40
KGRRRQSSGITVMGHL

SEQ ID NO: 31055 - protein, 16 aa, Homo sapiens
  ( 140 )...( 155 ): >Q8WX40
GRRRQSSGITVMGHLT

SEQ ID NO: 31056 - protein, 16 aa, Homo sapiens
  ( 141 )...( 156 ): >Q8WX40
RRRQSSGITVMGHLTT

SEQ ID NO: 31057 - protein, 16 aa, Homo sapiens
  ( 64 )...( 79 ): >Q96T93
VLELTVRRVQGVLRGR

SEQ ID NO: 31058 - protein, 16 aa, Homo sapiens
  ( 65 )...( 80 ): >Q96T93
LELTVRRVQGVLRGRA

SEQ ID NO: 31059 - protein, 16 aa, Homo sapiens
  ( 66 )...( 81 ): >Q96T93
ELTVRRVQGVLRGRAR

SEQ ID NO: 31060 - protein, 16 aa, Homo sapiens
  ( 67 )...( 82 ): >Q96T93
LTVRRVQGVLRGRARE

SEQ ID NO: 31061 - protein, 16 aa, Homo sapiens
  ( 69 )...( 84 ): >Q96T93
VRRVQGVLRGRARERE

SEQ ID NO: 31062 - protein, 16 aa, Homo sapiens
  ( 70 )...( 85 ): >Q96T93
RRVQGVLRGRAREREQ

SEQ ID NO: 31063 - protein, 16 aa, Homo sapiens
  ( 71 )...( 86 ): >Q96T93
RVQGVLRGRAREREQL

SEQ ID NO: 31064 - protein, 16 aa, Homo sapiens
  ( 59 )...( 74 ): >Q9BY81
DKASIIRLTISYLKMR

SEQ ID NO: 31065 - protein, 16 aa, Homo sapiens
  ( 60 )...( 75 ): >Q9BY81
KASIIRLTISYLKMRD

SEQ ID NO: 31066 - protein, 16 aa, Homo sapiens
  ( 91 )...( 106 ): >Q9BY81
PPPNTSVKVIGAQRRR

SEQ ID NO: 31067 - protein, 16 aa, Homo sapiens
  ( 92 )...( 107 ): >Q9BY81
PPNTSVKVIGAQRRRS

SEQ ID NO: 31068 - protein, 16 aa, Homo sapiens
  ( 93 )...( 108 ): >Q9BY81
PNTSVKVIGAQRRRSP

SEQ ID NO: 31069 - protein, 16 aa, Homo sapiens
  ( 94 )...( 109 ): >Q9BY81
NTSVKVIGAQRRRSPS

SEQ ID NO: 31070 - protein, 16 aa, Homo sapiens
  ( 95 )...( 110 ): >Q9BY81
TSVKVIGAQRRRSPSA

SEQ ID NO: 31071 - protein, 16 aa, Homo sapiens
  ( 96 )...( 111 ): >Q9BY81
SVKVIGAQRRRSPSAL

SEQ ID NO: 31072 - protein, 16 aa, Homo sapiens
  ( 97 )...( 112 ): >Q9BY81
VKVIGAQRRRSPSALA

SEQ ID NO: 31073 - protein, 16 aa, Homo sapiens
  ( 98 )...( 113 ): >Q9BY81
KVIGAQRRRSPSALAI

SEQ ID NO: 31074 - protein, 16 aa, Homo sapiens
  ( 230 )...( 245 ): >Q9BY81
ERSFFIRMKSTLTKRG

SEQ ID NO: 31075 - protein, 16 aa, Homo sapiens
  ( 231 )...( 246 ): >Q9BY81
RSFFIRMKSTLTKRGV

SEQ ID NO: 31076 - protein, 16 aa, Homo sapiens
  ( 232 )...( 247 ): >Q9BY81
SFFIRMKSTLTKRGVH

SEQ ID NO: 31077 - protein, 16 aa, Homo sapiens
  ( 233 )...( 248 ): >Q9BY81
FFIRMKSTLTKRGVHI

SEQ ID NO: 31078 - protein, 16 aa, Homo sapiens
  ( 234 )...( 249 ): >Q9BY81
FIRMKSTLTKRGVHIK

SEQ ID NO: 31079 - protein, 16 aa, Homo sapiens
  ( 235 )...( 250 ): >Q9BY81
IRMKSTLTKRGVHIKS

SEQ ID NO: 31080 - protein, 16 aa, Homo sapiens
  ( 236 )...( 251 ): >Q9BY81
RMKSTLTKRGVHIKSS

SEQ ID NO: 31081 - protein, 16 aa, Homo sapiens
  ( 240 )...( 255 ): >Q9BY81
TLTKRGVHIKSSGYKV

SEQ ID NO: 31082 - protein, 16 aa, Homo sapiens
  ( 241 )...( 256 ): >Q9BY81
LTKRGVHIKSSGYKVI

SEQ ID NO: 31083 - protein, 16 aa, Homo sapiens
  ( 243 )...( 258 ): >Q9BY81
KRGVHIKSSGYKVIHI

SEQ ID NO: 31084 - protein, 16 aa, Homo sapiens
  ( 248 )...( 263 ): >Q9BY81
IKSSGYKVIHITGRLR

SEQ ID NO: 31085 - protein, 16 aa, Homo sapiens
  ( 249 )...( 264 ): >Q9BY81
KSSGYKVIHITGRLRL

SEQ ID NO: 31086 - protein, 16 aa, Homo sapiens
  ( 250 )...( 265 ): >Q9BY81
SSGYKVIHITGRLRLR

SEQ ID NO: 31087 - protein, 16 aa, Homo sapiens
  ( 251 )...( 266 ): >Q9BY81
SGYKVIHITGRLRLRV

SEQ ID NO: 31088 - protein, 16 aa, Homo sapiens
  ( 252 )...( 267 ): >Q9BY81
GYKVIHITGRLRLRVS

SEQ ID NO: 31089 - protein, 16 aa, Homo sapiens
  ( 253 )...( 268 ): >Q9BY81
YKVIHITGRLRLRVSL

SEQ ID NO: 31090 - protein, 16 aa, Homo sapiens
  ( 254 )...( 269 ): >Q9BY81
KVIHITGRLRLRVSLS

SEQ ID NO: 31091 - protein, 16 aa, Homo sapiens
  ( 255 )...( 270 ): >Q9BY81
VIHITGRLRLRVSLSH

SEQ ID NO: 31092 - protein, 16 aa, Homo sapiens
  ( 256 )...( 271 ): >Q9BY81
IHITGRLRLRVSLSHG

SEQ ID NO: 31093 - protein, 16 aa, Homo sapiens
  ( 257 )...( 272 ): >Q9BY81
HITGRLRLRVSLSHGR

SEQ ID NO: 31094 - protein, 16 aa, Homo sapiens
  ( 258 )...( 273 ): >Q9BY81
ITGRLRLRVSLSHGRT

SEQ ID NO: 31095 - protein, 16 aa, Homo sapiens
  ( 259 )...( 274 ): >Q9BY81
TGRLRLRVSLSHGRTV

SEQ ID NO: 31096 - protein, 16 aa, Homo sapiens
  ( 260 )...( 275 ): >Q9BY81
GRLRLRVSLSHGRTVP

SEQ ID NO: 31097 - protein, 16 aa, Homo sapiens
  ( 261 )...( 276 ): >Q9BY81
RLRLRVSLSHGRTVPS

SEQ ID NO: 31098 - protein, 16 aa, Homo sapiens
  ( 262 )...( 277 ): >Q9BY81
LRLRVSLSHGRTVPSQ

SEQ ID NO: 31099 - protein, 16 aa, Homo sapiens
  ( 263 )...( 278 ): >Q9BY81
RLRVSLSHGRTVPSQI

SEQ ID NO: 31100 - protein, 16 aa, Homo sapiens
  ( 575 )...( 590 ): >Q9BY81
KRQKGGSASRRRLSSA

SEQ ID NO: 31101 - protein, 16 aa, Homo sapiens
  ( 576 )...( 591 ): >Q9BY81
RQKGGSASRRRLSSAS

SEQ ID NO: 31102 - protein, 16 aa, Homo sapiens
  ( 39 )...( 54 ): >Q9BW11
GPIHRRKKRPPQAPGA

SEQ ID NO: 31103 - protein, 16 aa, Homo sapiens
  ( 71 )...( 86 ): >Q9BW11
AQLKRCLERLKQQMPL

SEQ ID NO: 31104 - protein, 16 aa, Homo sapiens
  ( 72 )...( 87 ): >Q9BW11
QLKRCLERLKQQMPLG

SEQ ID NO: 31105 - protein, 16 aa, Homo sapiens
  ( 73 )...( 88 ): >Q9BW11
LKRCLERLKQQMPLGA

SEQ ID NO: 31106 - protein, 16 aa, Homo sapiens
  ( 88 )...( 103 ): >Q9BW11
ADCARYTTLSLLRRAR

SEQ ID NO: 31107 - protein, 16 aa, Homo sapiens
  ( 89 )...( 104 ): >Q9BW11
DCARYTTLSLLRRARM

SEQ ID NO: 31108 - protein, 16 aa, Homo sapiens
  ( 90 )...( 105 ): >Q9BW11
CARYTTLSLLRRARMH

SEQ ID NO: 31109 - protein, 16 aa, Homo sapiens
  ( 91 )...( 106 ): >Q9BW11
ARYTTLSLLRRARMHI

SEQ ID NO: 31110 - protein, 16 aa, Homo sapiens
  ( 93 )...( 108 ): >Q9BW11
YTTLSLLRRARMHIQK

SEQ ID NO: 31111 - protein, 16 aa, Homo sapiens
  ( 94 )...( 109 ): >Q9BW11
TTLSLLRRARMHIQKL

SEQ ID NO: 31112 - protein, 16 aa, Homo sapiens
  ( 95 )...( 110 ): >Q9BW11
TLSLLRRARMHIQKLE

SEQ ID NO: 31113 - protein, 16 aa, Homo sapiens
  ( 452 )...( 467 ): >Q8NHD4
LKDRPARDGATVSRMK

SEQ ID NO: 31114 - protein, 16 aa, Homo sapiens
  ( 453 )...( 468 ): >Q8NHD4
KDRPARDGATVSRMKL

SEQ ID NO: 31115 - protein, 16 aa, Homo sapiens
  ( 455 )...( 470 ): >Q8NHD4
RPARDGATVSRMKLQV

SEQ ID NO: 31116 - protein, 16 aa, Homo sapiens
  ( 540 )...( 555 ): >Q8NHD4
QGRQRPAWLQVLSRPL

SEQ ID NO: 31117 - protein, 16 aa, Homo sapiens
  ( 66 )...( 81 ): >Q9P2S3
VLELTVRRVQGVLRGR

SEQ ID NO: 31118 - protein, 16 aa, Homo sapiens
  ( 67 )...( 82 ): >Q9P2S3
LELTVRRVQGVLRGRA

SEQ ID NO: 31119 - protein, 16 aa, Homo sapiens
  ( 68 )...( 83 ): >Q9P2S3
ELTVRRVQGVLRGRAR

SEQ ID NO: 31120 - protein, 16 aa, Homo sapiens
  ( 69 )...( 84 ): >Q9P2S3
LTVRRVQGVLRGRARE

SEQ ID NO: 31121 - protein, 16 aa, Homo sapiens
  ( 71 )...( 86 ): >Q9P2S3
VRRVQGVLRGRARERE

SEQ ID NO: 31122 - protein, 16 aa, Homo sapiens
  ( 72 )...( 87 ): >Q9P2S3
RRVQGVLRGRAREREQ

SEQ ID NO: 31123 - protein, 16 aa, Homo sapiens
  ( 73 )...( 88 ): >Q9P2S3
RVQGVLRGRAREREQL

SEQ ID NO: 31124 - protein, 16 aa, Homo sapiens
  ( 44 )...( 59 ): >Q9UPH7
KASIMRLTISYLRMHR

SEQ ID NO: 31125 - protein, 16 aa, Homo sapiens
  ( 45 )...( 60 ): >Q9UPH7
ASIMRLTISYLRMHRL

SEQ ID NO: 31126 - protein, 16 aa, Homo sapiens
  ( 46 )...( 61 ): >Q9UPH7
SIMRLTISYLRMHRLC

SEQ ID NO: 31127 - protein, 16 aa, Homo sapiens
  ( 47 )...( 62 ): >Q9UPH7
IMRLTISYLRMHRLCA

SEQ ID NO: 31128 - protein, 16 aa, Homo sapiens
  ( 48 )...( 63 ): >Q9UPH7
MRLTISYLRMHRLCAA

SEQ ID NO: 31129 - protein, 16 aa, Homo sapiens
  ( 49 )...( 64 ): >Q9UPH7
RLTISYLRMHRLCAAG

SEQ ID NO: 31130 - protein, 16 aa, Homo sapiens
  ( 231 )...( 246 ): >Q8NFJ8
SSSSKKSKEQKALRLN

SEQ ID NO: 31131 - protein, 16 aa, Homo sapiens
  ( 232 )...( 247 ): >Q8NFJ8
SSSKKSKEQKALRLNI

SEQ ID NO: 31132 - protein, 16 aa, Homo sapiens
  ( 234 )...( 249 ): >Q8NFJ8
SKKSKEQKALRLNINA

SEQ ID NO: 31133 - protein, 16 aa, Homo sapiens
  ( 265 )...( 280 ): >Q8NFJ8
LRAVIPYAHSPSVRKL

SEQ ID NO: 31134 - protein, 16 aa, Homo sapiens
  ( 275 )...( 290 ): >Q8NFJ8
PSVRKLSKIATLLLAK

SEQ ID NO: 31135 - protein, 16 aa, Homo sapiens
  ( 276 )...( 291 ): >Q8NFJ8
SVRKLSKIATLLLAKN

SEQ ID NO: 31136 - protein, 16 aa, Homo sapiens
  ( 277 )...( 292 ): >Q8NFJ8
VRKLSKIATLLLAKNY

SEQ ID NO: 31137 - protein, 16 aa, Homo sapiens
  ( 278 )...( 293 ): >Q8NFJ8
RKLSKIATLLLAKNYI

SEQ ID NO: 31138 - protein, 16 aa, Homo sapiens
  ( 141 )...( 156 ): >Q9UQC6
LDNLRKVVPCYSKTQK

SEQ ID NO: 31139 - protein, 16 aa, Homo sapiens
  ( 142 )...( 157 ): >Q9UQC6
DNLRKVVPCYSKTQKL

SEQ ID NO: 31140 - protein, 16 aa, Homo sapiens
  ( 143 )...( 158 ): >Q9UQC6
NLRKVVPCYSKTQKLS

SEQ ID NO: 31141 - protein, 16 aa, Homo sapiens
  ( 144 )...( 159 ): >Q9UQC6
LRKVVPCYSKTQKLSK

SEQ ID NO: 31142 - protein, 16 aa, Homo sapiens
  ( 145 )...( 160 ): >Q9UQC6
RKVVPCYSKTQKLSKI

SEQ ID NO: 31143 - protein, 16 aa, Homo sapiens
  ( 152 )...( 167 ): >Q9UQC6
SKTQKLSKIETLRLAK

SEQ ID NO: 31144 - protein, 16 aa, Homo sapiens
  ( 153 )...( 168 ): >Q9UQC6
KTQKLSKIETLRLAKN

SEQ ID NO: 31145 - protein, 16 aa, Homo sapiens
  ( 155 )...( 170 ): >Q9UQC6
QKLSKIETLRLAKNYI

SEQ ID NO: 31146 - protein, 16 aa, Homo sapiens
  ( 30 )...( 45 ): >Q9HC25
KRLSKVDTLRLAIGYI

SEQ ID NO: 31147 - protein, 16 aa, Homo sapiens
  ( 57 )...( 72 ): >Q9BRJ9
RPGTLRDPRAPSVGRR

SEQ ID NO: 31148 - protein, 16 aa, Homo sapiens
  ( 59 )...( 74 ): >Q9BRJ9
GTLRDPRAPSVGRRGA

SEQ ID NO: 31149 - protein, 16 aa, Homo sapiens
  ( 60 )...( 75 ): >Q9BRJ9
TLRDPRAPSVGRRGAR

SEQ ID NO: 31150 - protein, 16 aa, Homo sapiens
  ( 61 )...( 76 ): >Q9BRJ9
LRDPRAPSVGRRGARS

SEQ ID NO: 31151 - protein, 16 aa, Homo sapiens
  ( 64 )...( 79 ): >Q9BRJ9
PRAPSVGRRGARSSRL

SEQ ID NO: 31152 - protein, 16 aa, Homo sapiens
  ( 65 )...( 80 ): >Q9BRJ9
RAPSVGRRGARSSRLG

SEQ ID NO: 31153 - protein, 16 aa, Homo sapiens
  ( 69 )...( 84 ): >Q9BRJ9
VGRRGARSSRLGSGQR

SEQ ID NO: 31154 - protein, 16 aa, Homo sapiens
  ( 72 )...( 87 ): >Q9BRJ9
RGARSSRLGSGQRQSA

SEQ ID NO: 31155 - protein, 16 aa, Homo sapiens
  ( 86 )...( 101 ): >Q9BRJ9
SASEREKLRMRTLARA

SEQ ID NO: 31156 - protein, 16 aa, Homo sapiens
  ( 87 )...( 102 ): >Q9BRJ9
ASEREKLRMRTLARAL

SEQ ID NO: 31157 - protein, 16 aa, Homo sapiens
  ( 146 )...( 161 ): >Q9BRJ9
SLQRRCRQRGDAGSPR

SEQ ID NO: 31158 - protein, 16 aa, Homo sapiens
  ( 147 )...( 162 ): >Q9BRJ9
LQRRCRQRGDAGSPRG

SEQ ID NO: 31159 - protein, 16 aa, Homo sapiens
  ( 79 )...( 94 ): >Q96FL2
AHTQAEQKRRDAIKRG

SEQ ID NO: 31160 - protein, 16 aa, Homo sapiens
  ( 146 )...( 161 ): >Q96FL2
TLRKDVTALKIMKVNY

SEQ ID NO: 31161 - protein, 16 aa, Homo sapiens
  ( 54 )...( 69 ): >Q14959
QKKIKSEASPRPLKSV

SEQ ID NO: 31162 - protein, 16 aa, Homo sapiens
  ( 55 )...( 70 ): >Q14959
KKIKSEASPRPLKSVI

SEQ ID NO: 31163 - protein, 16 aa, Homo sapiens
  ( 117 )...( 132 ): >Q14959
LVKNEKAAKVVILKKA

SEQ ID NO: 31164 - protein, 16 aa, Homo sapiens
  ( 118 )...( 133 ): >Q14959
VKNEKAAKVVILKKAT

SEQ ID NO: 31165 - protein, 16 aa, Homo sapiens
  ( 152 )...( 167 ): >Q14959
KLQARQQQLLKKIEHA

SEQ ID NO: 31166 - protein, 16 aa, Homo sapiens
  ( 154 )...( 169 ): >Q14959
QARQQQLLKKIEHART

SEQ ID NO: 31167 - protein, 16 aa, Homo sapiens
  ( 155 )...( 170 ): >Q14959
ARQQQLLKKIEHARTC

SEQ ID NO: 31168 - protein, 15 aa, Homo sapiens
  ( 156 )...( 171 ): >Q14959
RQQQLLKKIEHARTC

SEQ ID NO: 31169 - protein, 16 aa, Homo sapiens
  ( 21 )...( 36 ): >Q8NDC7
FPSLPVRWRRLLPLGG

SEQ ID NO: 31170 - protein, 16 aa, Homo sapiens
  ( 22 )...( 37 ): >Q8NDC7
PSLPVRWRRLLPLGGG

SEQ ID NO: 31171 - protein, 16 aa, Homo sapiens
  ( 23 )...( 38 ): >Q8NDC7
SLPVRWRRLLPLGGGW

SEQ ID NO: 31172 - protein, 16 aa, Homo sapiens
  ( 24 )...( 39 ): >Q8NDC7
LPVRWRRLLPLGGGWR

SEQ ID NO: 31173 - protein, 16 aa, Homo sapiens
  ( 25 )...( 40 ): >Q8NDC7
PVRWRRLLPLGGGWRG

SEQ ID NO: 31174 - protein, 16 aa, Homo sapiens
  ( 26 )...( 41 ): >Q8NDC7
VRWRRLLPLGGGWRGG

SEQ ID NO: 31175 - protein, 16 aa, Homo sapiens
  ( 27 )...( 42 ): >Q8NDC7
RWRRLLPLGGGWRGGG

SEQ ID NO: 31176 - protein, 16 aa, Homo sapiens
  ( 28 )...( 43 ): >Q8NDC7
WRRLLPLGGGWRGGGG

SEQ ID NO: 31177 - protein, 16 aa, Homo sapiens
  ( 55 )...( 70 ): >Q8NDC7
RLILDSRFSCLRPRVA

SEQ ID NO: 31178 - protein, 16 aa, Homo sapiens
  ( 95 )...( 110 ): >Q8NDC7
IQGGGAIVQRAIKRRP

SEQ ID NO: 31179 - protein, 16 aa, Homo sapiens
  ( 96 )...( 111 ): >Q8NDC7
QGGGAIVQRAIKRRPG

SEQ ID NO: 31180 - protein, 16 aa, Homo sapiens
  ( 98 )...( 113 ): >Q8NDC7
GGAIVQRAIKRRPGLD

SEQ ID NO: 31181 - protein, 16 aa, Homo sapiens
  ( 99 )...( 114 ): >Q8NDC7
GAIVQRAIKRRPGLDF

SEQ ID NO: 31182 - protein, 16 aa, Homo sapiens
  ( 183 )...( 198 ): >Q8NDC7
TCSALARKPDKLTILR

SEQ ID NO: 31183 - protein, 16 aa, Homo sapiens
  ( 184 )...( 199 ): >Q8NDC7
CSALARKPDKLTILRM

SEQ ID NO: 31184 - protein, 16 aa, Homo sapiens
  ( 185 )...( 200 ): >Q8NDC7
SALARKPDKLTILRMA

SEQ ID NO: 31185 - protein, 16 aa, Homo sapiens
  ( 186 )...( 201 ): >Q8NDC7
ALARKPDKLTILRMAV

SEQ ID NO: 31186 - protein, 16 aa, Homo sapiens
  ( 187 )...( 202 ): >Q8NDC7
LARKPDKLTILRMAVS

SEQ ID NO: 31187 - protein, 16 aa, Homo sapiens
  ( 188 )...( 203 ): >Q8NDC7
ARKPDKLTILRMAVSH

SEQ ID NO: 31188 - protein, 16 aa, Homo sapiens
  ( 189 )...( 204 ): >Q8NDC7
RKPDKLTILRMAVSHM

SEQ ID NO: 31189 - protein, 16 aa, Homo sapiens
  ( 193 )...( 208 ): >Q8NDC7
KLTILRMAVSHMKSLR

SEQ ID NO: 31190 - protein, 16 aa, Homo sapiens
  ( 194 )...( 209 ): >Q8NDC7
LTILRMAVSHMKSLRG

SEQ ID NO: 31191 - protein, 16 aa, Homo sapiens
  ( 196 )...( 211 ): >Q8NDC7
ILRMAVSHMKSLRGTG

SEQ ID NO: 31192 - protein, 16 aa, Homo sapiens
  ( 197 )...( 212 ): >Q8NDC7
LRMAVSHMKSLRGTGN

SEQ ID NO: 31193 - protein, 16 aa, Homo sapiens
  ( 342 )...( 357 ): >Q8NDC7
VSVNRLSFVRNRCRNG

SEQ ID NO: 31194 - protein, 16 aa, Homo sapiens
  ( 344 )...( 359 ): >Q8NDC7
VNRLSFVRNRCRNGLG

SEQ ID NO: 31195 - protein, 16 aa, Homo sapiens
  ( 346 )...( 361 ): >Q8NDC7
RLSFVRNRCRNGLGSV

SEQ ID NO: 31196 - protein, 16 aa, Homo sapiens
  ( 347 )...( 362 ): >Q8NDC7
LSFVRNRCRNGLGSVK

SEQ ID NO: 31197 - protein, 16 aa, Homo sapiens
  ( 473 )...( 488 ): >Q8NDC7
QQVVKLKGQVLSVMFR

SEQ ID NO: 31198 - protein, 16 aa, Homo sapiens
  ( 474 )...( 489 ): >Q8NDC7
QVVKLKGQVLSVMFRF

SEQ ID NO: 31199 - protein, 16 aa, Homo sapiens
  ( 475 )...( 490 ): >Q8NDC7
VVKLKGQVLSVMFRFR

SEQ ID NO: 31200 - protein, 16 aa, Homo sapiens
  ( 476 )...( 491 ): >Q8NDC7
VKLKGQVLSVMFRFRS

SEQ ID NO: 31201 - protein, 16 aa, Homo sapiens
  ( 477 )...( 492 ): >Q8NDC7
KLKGQVLSVMFRFRSK

SEQ ID NO: 31202 - protein, 16 aa, Homo sapiens
  ( 478 )...( 493 ): >Q8NDC7
LKGQVLSVMFRFRSKN

SEQ ID NO: 31203 - protein, 16 aa, Homo sapiens
  ( 68 )...( 83 ): >Q9HCA4
WACKVCKRKSVSVDRR

SEQ ID NO: 31204 - protein, 16 aa, Homo sapiens
  ( 69 )...( 84 ): >Q9HCA4
ACKVCKRKSVSVDRRR

SEQ ID NO: 31205 - protein, 16 aa, Homo sapiens
  ( 70 )...( 85 ): >Q9HCA4
CKVCKRKSVSVDRRRA

SEQ ID NO: 31206 - protein, 16 aa, Homo sapiens
  ( 71 )...( 86 ): >Q9HCA4
KVCKRKSVSVDRRRAA

SEQ ID NO: 31207 - protein, 16 aa, Homo sapiens
  ( 72 )...( 87 ): >Q9HCA4
VCKRKSVSVDRRRAAT

SEQ ID NO: 31208 - protein, 16 aa, Homo sapiens
  ( 73 )...( 88 ): >Q9HCA4
CKRKSVSVDRRRAATL

SEQ ID NO: 31209 - protein, 16 aa, Homo sapiens
  ( 74 )...( 89 ): >Q9HCA4
KRKSVSVDRRRAATLR

SEQ ID NO: 31210 - protein, 16 aa, Homo sapiens
  ( 75 )...( 90 ): >Q9HCA4
RKSVSVDRRRAATLRE

SEQ ID NO: 31211 - protein, 16 aa, Homo sapiens
  ( 76 )...( 91 ): >Q9HCA4
KSVSVDRRRAATLREK

SEQ ID NO: 31212 - protein, 16 aa, Homo sapiens
  ( 77 )...( 92 ): >Q9HCA4
SVSVDRRRAATLREKR

SEQ ID NO: 31213 - protein, 16 aa, Homo sapiens
  ( 85 )...( 100 ): >Q9HCA4
AATLREKRRLKKVNEA

SEQ ID NO: 31214 - protein, 16 aa, Homo sapiens
  ( 93 )...( 108 ): >Q9HCA4
RLKKVNEAFEALKRST

SEQ ID NO: 31215 - protein, 16 aa, Homo sapiens
  ( 104 )...( 119 ): >Q9HCA4
LKRSTLLNPNQRLPKV

SEQ ID NO: 31216 - protein, 16 aa, Homo sapiens
  ( 47 )...( 62 ): >O95262
KASIMRLTISYLRMHR

SEQ ID NO: 31217 - protein, 16 aa, Homo sapiens
  ( 48 )...( 63 ): >O95262
ASIMRLTISYLRMHRL

SEQ ID NO: 31218 - protein, 16 aa, Homo sapiens
  ( 49 )...( 64 ): >O95262
SIMRLTISYLRMHRLC

SEQ ID NO: 31219 - protein, 16 aa, Homo sapiens
  ( 50 )...( 65 ): >O95262
IMRLTISYLRMHRLCA

SEQ ID NO: 31220 - protein, 16 aa, Homo sapiens
  ( 51 )...( 66 ): >O95262
MRLTISYLRMHRLCAA

SEQ ID NO: 31221 - protein, 16 aa, Homo sapiens
  ( 52 )...( 67 ): >O95262
RLTISYLRMHRLCAAG

SEQ ID NO: 31222 - protein, 16 aa, Homo sapiens
  ( 51 )...( 66 ): >Q96J63
QCNPMARKLDKLTVLR

SEQ ID NO: 31223 - protein, 16 aa, Homo sapiens
  ( 52 )...( 67 ): >Q96J63
CNPMARKLDKLTVLRM

SEQ ID NO: 31224 - protein, 16 aa, Homo sapiens
  ( 53 )...( 68 ): >Q96J63
NPMARKLDKLTVLRMA

SEQ ID NO: 31225 - protein, 16 aa, Homo sapiens
  ( 54 )...( 69 ): >Q96J63
PMARKLDKLTVLRMAV

SEQ ID NO: 31226 - protein, 16 aa, Homo sapiens
  ( 55 )...( 70 ): >Q96J63
MARKLDKLTVLRMAVQ

SEQ ID NO: 31227 - protein, 16 aa, Homo sapiens
  ( 56 )...( 71 ): >Q96J63
ARKLDKLTVLRMAVQH

SEQ ID NO: 31228 - protein, 16 aa, Homo sapiens
  ( 57 )...( 72 ): >Q96J63
RKLDKLTVLRMAVQHL

SEQ ID NO: 31229 - protein, 16 aa, Homo sapiens
  ( 58 )...( 73 ): >Q96J63
KLDKLTVLRMAVQHLR

SEQ ID NO: 31230 - protein, 16 aa, Homo sapiens
  ( 61 )...( 76 ): >Q96J63
KLTVLRMAVQHLRSLK

SEQ ID NO: 31231 - protein, 16 aa, Homo sapiens
  ( 62 )...( 77 ): >Q96J63
LTVLRMAVQHLRSLKG

SEQ ID NO: 31232 - protein, 16 aa, Homo sapiens
  ( 63 )...( 78 ): >Q96J63
TVLRMAVQHLRSLKGL

SEQ ID NO: 31233 - protein, 16 aa, Homo sapiens
  ( 64 )...( 79 ): >Q96J63
VLRMAVQHLRSLKGLT

SEQ ID NO: 31234 - protein, 16 aa, Homo sapiens
  ( 65 )...( 80 ): >Q96J63
LRMAVQHLRSLKGLTN

SEQ ID NO: 31235 - protein, 16 aa, Homo sapiens
  ( 66 )...( 81 ): >Q96J63
RMAVQHLRSLKGLTNS

SEQ ID NO: 31236 - protein, 16 aa, Homo sapiens
  ( 116 )...( 131 ): >Q96J63
RGKILFVSKSVSKILN

SEQ ID NO: 31237 - protein, 16 aa, Homo sapiens
  ( 180 )...( 195 ): >Q96J63
SNLHAGRTRVYSGSRR

SEQ ID NO: 31238 - protein, 16 aa, Homo sapiens
  ( 181 )...( 196 ): >Q96J63
NLHAGRTRVYSGSRRS

SEQ ID NO: 31239 - protein, 16 aa, Homo sapiens
  ( 182 )...( 197 ): >Q96J63
LHAGRTRVYSGSRRSF

SEQ ID NO: 31240 - protein, 16 aa, Homo sapiens
  ( 183 )...( 198 ): >Q96J63
HAGRTRVYSGSRRSFF

SEQ ID NO: 31241 - protein, 16 aa, Homo sapiens
  ( 66 )...( 81 ): >Q96HZ4
VLELTVRRVQGVLRGR

SEQ ID NO: 31242 - protein, 16 aa, Homo sapiens
  ( 67 )...( 82 ): >Q96HZ4
LELTVRRVQGVLRGRA

SEQ ID NO: 31243 - protein, 16 aa, Homo sapiens
  ( 68 )...( 83 ): >Q96HZ4
ELTVRRVQGVLRGRAR

SEQ ID NO: 31244 - protein, 16 aa, Homo sapiens
  ( 69 )...( 84 ): >Q96HZ4
LTVRRVQGVLRGRARE

SEQ ID NO: 31245 - protein, 16 aa, Homo sapiens
  ( 71 )...( 86 ): >Q96HZ4
VRRVQGVLRGRARERE

SEQ ID NO: 31246 - protein, 16 aa, Homo sapiens
  ( 72 )...( 87 ): >Q96HZ4
RRVQGVLRGRAREREQ

SEQ ID NO: 31247 - protein, 16 aa, Homo sapiens
  ( 73 )...( 88 ): >Q96HZ4
RVQGVLRGRAREREQL

SEQ ID NO: 31248 - protein, 16 aa, Homo sapiens
  ( 102 )...( 117 ): >Q9H2M4
QCNPMARKLDKLTVLR

SEQ ID NO: 31249 - protein, 16 aa, Homo sapiens
  ( 103 )...( 118 ): >Q9H2M4
CNPMARKLDKLTVLRM

SEQ ID NO: 31250 - protein, 16 aa, Homo sapiens
  ( 104 )...( 119 ): >Q9H2M4
NPMARKLDKLTVLRMA

SEQ ID NO: 31251 - protein, 16 aa, Homo sapiens
  ( 105 )...( 120 ): >Q9H2M4
PMARKLDKLTVLRMAV

SEQ ID NO: 31252 - protein, 16 aa, Homo sapiens
  ( 106 )...( 121 ): >Q9H2M4
MARKLDKLTVLRMAVQ

SEQ ID NO: 31253 - protein, 16 aa, Homo sapiens
  ( 107 )...( 122 ): >Q9H2M4
ARKLDKLTVLRMAVQH

SEQ ID NO: 31254 - protein, 16 aa, Homo sapiens
  ( 108 )...( 123 ): >Q9H2M4
RKLDKLTVLRMAVQHL

SEQ ID NO: 31255 - protein, 16 aa, Homo sapiens
  ( 109 )...( 124 ): >Q9H2M4
KLDKLTVLRMAVQHLR

SEQ ID NO: 31256 - protein, 16 aa, Homo sapiens
  ( 112 )...( 127 ): >Q9H2M4
KLTVLRMAVQHLRSLK

SEQ ID NO: 31257 - protein, 16 aa, Homo sapiens
  ( 113 )...( 128 ): >Q9H2M4
LTVLRMAVQHLRSLKG

SEQ ID NO: 31258 - protein, 16 aa, Homo sapiens
  ( 114 )...( 129 ): >Q9H2M4
TVLRMAVQHLRSLKGL

SEQ ID NO: 31259 - protein, 16 aa, Homo sapiens
  ( 115 )...( 130 ): >Q9H2M4
VLRMAVQHLRSLKGLT

SEQ ID NO: 31260 - protein, 16 aa, Homo sapiens
  ( 116 )...( 131 ): >Q9H2M4
LRMAVQHLRSLKGLTN

SEQ ID NO: 31261 - protein, 16 aa, Homo sapiens
  ( 117 )...( 132 ): >Q9H2M4
RMAVQHLRSLKGLTNS

SEQ ID NO: 31262 - protein, 16 aa, Homo sapiens
  ( 167 )...( 182 ): >Q9H2M4
RGKILFVSKSVSKILN

SEQ ID NO: 31263 - protein, 16 aa, Homo sapiens
  ( 231 )...( 246 ): >Q9H2M4
SNLHAGRTRVYSGSRR

SEQ ID NO: 31264 - protein, 16 aa, Homo sapiens
  ( 232 )...( 247 ): >Q9H2M4
NLHAGRTRVYSGSRRS

SEQ ID NO: 31265 - protein, 16 aa, Homo sapiens
  ( 233 )...( 248 ): >Q9H2M4
LHAGRTRVYSGSRRSF

SEQ ID NO: 31266 - protein, 16 aa, Homo sapiens
  ( 234 )...( 249 ): >Q9H2M4
HAGRTRVYSGSRRSFF

SEQ ID NO: 31267 - protein, 16 aa, Homo sapiens
  ( 28 )...( 43 ): >Q96E53
TSTANRRAHLRLCLER

SEQ ID NO: 31268 - protein, 16 aa, Homo sapiens
  ( 29 )...( 44 ): >Q96E53
STANRRAHLRLCLERL

SEQ ID NO: 31269 - protein, 16 aa, Homo sapiens
  ( 33 )...( 48 ): >Q96E53
RRAHLRLCLERLKVLI

SEQ ID NO: 31270 - protein, 16 aa, Homo sapiens
  ( 34 )...( 49 ): >Q96E53
RAHLRLCLERLKVLIP

SEQ ID NO: 31271 - protein, 16 aa, Homo sapiens
  ( 56 )...( 71 ): >Q96E53
RHTTLGLLNKAKAHIK

SEQ ID NO: 31272 - protein, 16 aa, Homo sapiens
  ( 58 )...( 73 ): >Q96E53
TTLGLLNKAKAHIKKL

SEQ ID NO: 31273 - protein, 16 aa, Homo sapiens
  ( 18 )...( 33 ): >Q15355
VKRKATDAAYQARQAV

SEQ ID NO: 31274 - protein, 16 aa, Homo sapiens
  ( 19 )...( 34 ): >Q15355
KRKATDAAYQARQAVK

SEQ ID NO: 31275 - protein, 16 aa, Homo sapiens
  ( 20 )...( 35 ): >Q15355
RKATDAAYQARQAVKT

SEQ ID NO: 31276 - protein, 16 aa, Homo sapiens
  ( 24 )...( 39 ): >Q15355
DAAYQARQAVKTPPRR

SEQ ID NO: 31277 - protein, 16 aa, Homo sapiens
  ( 25 )...( 40 ): >Q15355
AAYQARQAVKTPPRRL

SEQ ID NO: 31278 - protein, 16 aa, Homo sapiens
  ( 26 )...( 41 ): >Q15355
AYQARQAVKTPPRRLP

SEQ ID NO: 31279 - protein, 16 aa, Homo sapiens
  ( 27 )...( 42 ): >Q15355
YQARQAVKTPPRRLPT

SEQ ID NO: 31280 - protein, 16 aa, Homo sapiens
  ( 28 )...( 43 ): >Q15355
QARQAVKTPPRRLPTV

SEQ ID NO: 31281 - protein, 16 aa, Homo sapiens
  ( 29 )...( 44 ): >Q15355
ARQAVKTPPRRLPTVM

SEQ ID NO: 31282 - protein, 16 aa, Homo sapiens
  ( 30 )...( 45 ): >Q15355
RQAVKTPPRRLPTVMV

SEQ ID NO: 31283 - protein, 16 aa, Homo sapiens
  ( 31 )...( 46 ): >Q15355
QAVKTPPRRLPTVMVR

SEQ ID NO: 31284 - protein, 16 aa, Homo sapiens
  ( 32 )...( 47 ): >Q15355
AVKTPPRRLPTVMVRS

SEQ ID NO: 31285 - protein, 16 aa, Homo sapiens
  ( 33 )...( 48 ): >Q15355
VKTPPRRLPTVMVRSP

SEQ ID NO: 31286 - protein, 16 aa, Homo sapiens
  ( 34 )...( 49 ): >Q15355
KTPPRRLPTVMVRSPI

SEQ ID NO: 31287 - protein, 16 aa, Homo sapiens
  ( 134 )...( 149 ): >Q15355
LLKKGSLLPTSPRLVN

SEQ ID NO: 31288 - protein, 16 aa, Homo sapiens
  ( 601 )...( 616 ): >Q15355
QAQKIWKKAIMLVWRA

SEQ ID NO: 31289 - protein, 16 aa, Homo sapiens
  ( 602 )...( 617 ): >Q15355
AQKIWKKAIMLVWRAA

SEQ ID NO: 31290 - protein, 16 aa, Homo sapiens
  ( 603 )...( 618 ): >Q15355
QKIWKKAIMLVWRAAA

SEQ ID NO: 31291 - protein, 16 aa, Homo sapiens
  ( 604 )...( 619 ): >Q15355
KIWKKAIMLVWRAAAN

SEQ ID NO: 31292 - protein, 16 aa, Homo sapiens
  ( 605 )...( 620 ): >Q15355
IWKKAIMLVWRAAANH

SEQ ID NO: 31293 - protein, 16 aa, Homo sapiens
  ( 717 )...( 732 ): >Q15355
SGISAKSLRGRDSTRK

SEQ ID NO: 31294 - protein, 16 aa, Homo sapiens
  ( 718 )...( 733 ): >Q15355
GISAKSLRGRDSTRKQ

SEQ ID NO: 31295 - protein, 16 aa, Homo sapiens
  ( 719 )...( 734 ): >Q15355
ISAKSLRGRDSTRKQD

SEQ ID NO: 31296 - protein, 16 aa, Homo sapiens
  ( 741 )...( 756 ): >Q15355
GTRGRRCAIEADMKMK

SEQ ID NO: 31297 - protein, 16 aa, Homo sapiens
  ( 742 )...( 757 ): >Q15355
TRGRRCAIEADMKMKK

SEQ ID NO: 31298 - protein, 15 aa, Homo sapiens
  ( 743 )...( 758 ): >Q15355
RGRRCAIEADMKMKK

SEQ ID NO: 31299 - protein, 16 aa, Homo sapiens
  ( 72 )...( 87 ): >Q9H7H9
DGSVSGSFRRAKLRLY

SEQ ID NO: 31300 - protein, 16 aa, Homo sapiens
  ( 73 )...( 88 ): >Q9H7H9
GSVSGSFRRAKLRLYL

SEQ ID NO: 31301 - protein, 16 aa, Homo sapiens
  ( 74 )...( 89 ): >Q9H7H9
SVSGSFRRAKLRLYLE

SEQ ID NO: 31302 - protein, 16 aa, Homo sapiens
  ( 75 )...( 90 ): >Q9H7H9
VSGSFRRAKLRLYLEQ

SEQ ID NO: 31303 - protein, 16 aa, Homo sapiens
  ( 76 )...( 91 ): >Q9H7H9
SGSFRRAKLRLYLEQL

SEQ ID NO: 31304 - protein, 16 aa, Homo sapiens
  ( 81 )...( 96 ): >Q9H7H9
RAKLRLYLEQLKQLVP

SEQ ID NO: 31305 - protein, 16 aa, Homo sapiens
  ( 102 )...( 117 ): >Q9H7H9
TRHTTLSLLKRAKVHI

SEQ ID NO: 31306 - protein, 16 aa, Homo sapiens
  ( 103 )...( 118 ): >Q9H7H9
RHTTLSLLKRAKVHIK

SEQ ID NO: 31307 - protein, 16 aa, Homo sapiens
  ( 104 )...( 119 ): >Q9H7H9
HTTLSLLKRAKVHIKK

SEQ ID NO: 31308 - protein, 16 aa, Homo sapiens
  ( 105 )...( 120 ): >Q9H7H9
TTLSLLKRAKVHIKKL

SEQ ID NO: 31309 - protein, 16 aa, Homo sapiens
  ( 106 )...( 121 ): >Q9H7H9
TLSLLKRAKVHIKKLE

SEQ ID NO: 31310 - protein, 16 aa, Homo sapiens
  ( 142 )...( 157 ): >Q9H7H9
KRRLEQLSVQSVERVR

SEQ ID NO: 31311 - protein, 16 aa, Homo sapiens
  ( 55 )...( 70 ): >Q96PT9
DKASVMRLTISYLRVR

SEQ ID NO: 31312 - protein, 16 aa, Homo sapiens
  ( 56 )...( 71 ): >Q96PT9
KASVMRLTISYLRVRK

SEQ ID NO: 31313 - protein, 16 aa, Homo sapiens
  ( 57 )...( 72 ): >Q96PT9
ASVMRLTISYLRVRKL

SEQ ID NO: 31314 - protein, 16 aa, Homo sapiens
  ( 58 )...( 73 ): >Q96PT9
SVMRLTISYLRVRKLL

SEQ ID NO: 31315 - protein, 16 aa, Homo sapiens
  ( 59 )...( 74 ): >Q96PT9
VMRLTISYLRVRKLLD

SEQ ID NO: 31316 - protein, 16 aa, Homo sapiens
  ( 60 )...( 75 ): >Q96PT9
MRLTISYLRVRKLLDA

SEQ ID NO: 31317 - protein, 16 aa, Homo sapiens
  ( 61 )...( 76 ): >Q96PT9
RLTISYLRVRKLLDAG

SEQ ID NO: 31318 - protein, 16 aa, Homo sapiens
  ( 144 )...( 159 ): >Q96PT9
MREMLTHRNGLVKKGK

SEQ ID NO: 31319 - protein, 16 aa, Homo sapiens
  ( 145 )...( 160 ): >Q96PT9
REMLTHRNGLVKKGKE

SEQ ID NO: 31320 - protein, 16 aa, Homo sapiens
  ( 150 )...( 165 ): >Q96PT9
HRNGLVKKGKEQNTQR

SEQ ID NO: 31321 - protein, 16 aa, Homo sapiens
  ( 151 )...( 166 ): >Q96PT9
RNGLVKKGKEQNTQRS

SEQ ID NO: 31322 - protein, 16 aa, Homo sapiens
  ( 152 )...( 167 ): >Q96PT9
NGLVKKGKEQNTQRSF

SEQ ID NO: 31323 - protein, 16 aa, Homo sapiens
  ( 153 )...( 168 ): >Q96PT9
GLVKKGKEQNTQRSFF

SEQ ID NO: 31324 - protein, 16 aa, Homo sapiens
  ( 154 )...( 169 ): >Q96PT9
LVKKGKEQNTQRSFFL

SEQ ID NO: 31325 - protein, 16 aa, Homo sapiens
  ( 163 )...( 178 ): >Q96PT9
TQRSFFLRMKCTLTSR

SEQ ID NO: 31326 - protein, 16 aa, Homo sapiens
  ( 164 )...( 179 ): >Q96PT9
QRSFFLRMKCTLTSRG

SEQ ID NO: 31327 - protein, 16 aa, Homo sapiens
  ( 165 )...( 180 ): >Q96PT9
RSFFLRMKCTLTSRGR

SEQ ID NO: 31328 - protein, 16 aa, Homo sapiens
  ( 166 )...( 181 ): >Q96PT9
SFFLRMKCTLTSRGRT

SEQ ID NO: 31329 - protein, 16 aa, Homo sapiens
  ( 167 )...( 182 ): >Q96PT9
FFLRMKCTLTSRGRTM

SEQ ID NO: 31330 - protein, 16 aa, Homo sapiens
  ( 168 )...( 183 ): >Q96PT9
FLRMKCTLTSRGRTMN

SEQ ID NO: 31331 - protein, 16 aa, Homo sapiens
  ( 169 )...( 184 ): >Q96PT9
LRMKCTLTSRGRTMNI

SEQ ID NO: 31332 - protein, 16 aa, Homo sapiens
  ( 170 )...( 185 ): >Q96PT9
RMKCTLTSRGRTMNIK

SEQ ID NO: 31333 - protein, 16 aa, Homo sapiens
  ( 171 )...( 186 ): >Q96PT9
MKCTLTSRGRTMNIKS

SEQ ID NO: 31334 - protein, 16 aa, Homo sapiens
  ( 172 )...( 187 ): >Q96PT9
KCTLTSRGRTMNIKSA

SEQ ID NO: 31335 - protein, 16 aa, Homo sapiens
  ( 174 )...( 189 ): >Q96PT9
TLTSRGRTMNIKSATW

SEQ ID NO: 31336 - protein, 16 aa, Homo sapiens
  ( 175 )...( 190 ): >Q96PT9
LTSRGRTMNIKSATWK

SEQ ID NO: 31337 - protein, 16 aa, Homo sapiens
  ( 176 )...( 191 ): >Q96PT9
TSRGRTMNIKSATWKV

SEQ ID NO: 31338 - protein, 16 aa, Homo sapiens
  ( 177 )...( 192 ): >Q96PT9
SRGRTMNIKSATWKVL

SEQ ID NO: 31339 - protein, 16 aa, Homo sapiens
  ( 178 )...( 193 ): >Q96PT9
RGRTMNIKSATWKVLH

SEQ ID NO: 31340 - protein, 16 aa, Homo sapiens
  ( 295 )...( 310 ): >Q96PT9
FTKGQVTTGQYRMLAK

SEQ ID NO: 31341 - protein, 16 aa, Homo sapiens
  ( 296 )...( 311 ): >Q96PT9
TKGQVTTGQYRMLAKR

SEQ ID NO: 31342 - protein, 16 aa, Homo sapiens
  ( 297 )...( 312 ): >Q96PT9
KGQVTTGQYRMLAKRG

SEQ ID NO: 31343 - protein, 16 aa, Homo sapiens
  ( 299 )...( 314 ): >Q96PT9
QVTTGQYRMLAKRGGY

SEQ ID NO: 31344 - protein, 16 aa, Homo sapiens
  ( 300 )...( 315 ): >Q96PT9
VTTGQYRMLAKRGGYV

SEQ ID NO: 31345 - protein, 16 aa, Homo sapiens
  ( 301 )...( 316 ): >Q96PT9
TTGQYRMLAKRGGYVW

SEQ ID NO: 31346 - protein, 16 aa, Homo sapiens
  ( 302 )...( 317 ): >Q96PT9
TGQYRMLAKRGGYVWV

SEQ ID NO: 31347 - protein, 16 aa, Homo sapiens
  ( 62 )...( 77 ): >Q8NFQ4
RQLLLQQQTSGLKSPK

SEQ ID NO: 31348 - protein, 16 aa, Homo sapiens
  ( 76 )...( 91 ): >Q8NDY6
FEQRRRRRGPGSAADG

SEQ ID NO: 31349 - protein, 16 aa, Homo sapiens
  ( 86 )...( 101 ): >Q8NDY6
GSAADGRRRPREQRSL

SEQ ID NO: 31350 - protein, 16 aa, Homo sapiens
  ( 123 )...( 138 ): >Q8NDY6
LRAVIPYAHSPSVRKL

SEQ ID NO: 31351 - protein, 16 aa, Homo sapiens
  ( 133 )...( 148 ): >Q8NDY6
PSVRKLSKIATLLLAK

SEQ ID NO: 31352 - protein, 16 aa, Homo sapiens
  ( 134 )...( 149 ): >Q8NDY6
SVRKLSKIATLLLAKN

SEQ ID NO: 31353 - protein, 16 aa, Homo sapiens
  ( 135 )...( 150 ): >Q8NDY6
VRKLSKIATLLLAKNY

SEQ ID NO: 31354 - protein, 16 aa, Homo sapiens
  ( 136 )...( 151 ): >Q8NDY6
RKLSKIATLLLAKNYI

SEQ ID NO: 31355 - protein, 16 aa, Homo sapiens
  ( 66 )...( 81 ): >Q8N2J2
VLELTVRRVQGVLRGR

SEQ ID NO: 31356 - protein, 16 aa, Homo sapiens
  ( 67 )...( 82 ): >Q8N2J2
LELTVRRVQGVLRGRA

SEQ ID NO: 31357 - protein, 16 aa, Homo sapiens
  ( 68 )...( 83 ): >Q8N2J2
ELTVRRVQGVLRGRAR

SEQ ID NO: 31358 - protein, 16 aa, Homo sapiens
  ( 69 )...( 84 ): >Q8N2J2
LTVRRVQGVLRGRARG

SEQ ID NO: 31359 - protein, 16 aa, Homo sapiens
  ( 70 )...( 85 ): >Q8N2J2
TVRRVQGVLRGRARGE

SEQ ID NO: 31360 - protein, 16 aa, Homo sapiens
  ( 71 )...( 86 ): >Q8N2J2
VRRVQGVLRGRARGEW

SEQ ID NO: 31361 - protein, 16 aa, Homo sapiens
  ( 74 )...( 89 ): >Q8N2J2
VQGVLRGRARGEWRRG

SEQ ID NO: 31362 - protein, 16 aa, Homo sapiens
  ( 75 )...( 90 ): >Q8N2J2
QGVLRGRARGEWRRGG

SEQ ID NO: 31363 - protein, 16 aa, Homo sapiens
  ( 94 )...( 109 ): >Q8N2J2
RPRAPVTPARRRTSLP

SEQ ID NO: 31364 - protein, 16 aa, Homo sapiens
  ( 95 )...( 110 ): >Q8N2J2
PRAPVTPARRRTSLPA

SEQ ID NO: 31365 - protein, 16 aa, Homo sapiens
  ( 96 )...( 111 ): >Q8N2J2
RAPVTPARRRTSLPAP

SEQ ID NO: 31366 - protein, 16 aa, Homo sapiens
  ( 104 )...( 119 ): >Q8N2J2
RRTSLPAPLSCRRRGL

SEQ ID NO: 31367 - protein, 16 aa, Homo sapiens
  ( 115 )...( 130 ): >Q8N2J2
RRRGLPPEQGAPPRLL

SEQ ID NO: 31368 - protein, 16 aa, Homo sapiens
  ( 149 )...( 164 ): >Q8N2J2
RAGRGSLPPTLGPRAR

SEQ ID NO: 31369 - protein, 16 aa, Homo sapiens
  ( 162 )...( 177 ): >Q8N2J2
RARAAAGGSERALRCR

SEQ ID NO: 31370 - protein, 16 aa, Homo sapiens
  ( 164 )...( 179 ): >Q8N2J2
RAAAGGSERALRCRLH

SEQ ID NO: 31371 - protein, 16 aa, Homo sapiens
  ( 169 )...( 184 ): >Q8N2J2
GSERALRCRLHPVHAR

SEQ ID NO: 31372 - protein, 16 aa, Homo sapiens
  ( 170 )...( 185 ): >Q8N2J2
SERALRCRLHPVHARG

SEQ ID NO: 31373 - protein, 16 aa, Homo sapiens
  ( 171 )...( 186 ): >Q8N2J2
ERALRCRLHPVHARGA

SEQ ID NO: 31374 - protein, 16 aa, Homo sapiens
  ( 172 )...( 187 ): >Q8N2J2
RALRCRLHPVHARGAH

SEQ ID NO: 31375 - protein, 16 aa, Homo sapiens
  ( 174 )...( 189 ): >Q8N2J2
LRCRLHPVHARGAHVR

SEQ ID NO: 31376 - protein, 16 aa, Homo sapiens
  ( 175 )...( 190 ): >Q8N2J2
RCRLHPVHARGAHVRV

SEQ ID NO: 31377 - protein, 16 aa, Homo sapiens
  ( 182 )...( 197 ): >Q8N2J2
HARGAHVRVHVPGHRR

SEQ ID NO: 31378 - protein, 16 aa, Homo sapiens
  ( 183 )...( 198 ): >Q8N2J2
ARGAHVRVHVPGHRRY

SEQ ID NO: 31379 - protein, 16 aa, Homo sapiens
  ( 239 )...( 254 ): >Q9H8R3
EYGARNRKSSKEKVAV

SEQ ID NO: 31380 - protein, 16 aa, Homo sapiens
  ( 240 )...( 255 ): >Q9H8R3
YGARNRKSSKEKVAVL

SEQ ID NO: 31381 - protein, 16 aa, Homo sapiens
  ( 241 )...( 256 ): >Q9H8R3
GARNRKSSKEKVAVLE

SEQ ID NO: 31382 - protein, 16 aa, Homo sapiens
  ( 242 )...( 257 ): >Q9H8R3
ARNRKSSKEKVAVLEV

SEQ ID NO: 31383 - protein, 16 aa, Homo sapiens
  ( 243 )...( 258 ): >Q9H8R3
RNRKSSKEKVAVLEVR

SEQ ID NO: 31384 - protein, 16 aa, Homo sapiens
  ( 244 )...( 259 ): >Q9H8R3
NRKSSKEKVAVLEVRT

SEQ ID NO: 31385 - protein, 16 aa, Homo sapiens
  ( 245 )...( 260 ): >Q9H8R3
RKSSKEKVAVLEVRTI

SEQ ID NO: 31386 - protein, 16 aa, Homo sapiens
  ( 344 )...( 359 ): >Q9H8R3
RWRKHLKGPLTRKCVG

SEQ ID NO: 31387 - protein, 16 aa, Homo sapiens
  ( 345 )...( 360 ): >Q9H8R3
WRKHLKGPLTRKCVGA

SEQ ID NO: 31388 - protein, 16 aa, Homo sapiens
  ( 346 )...( 361 ): >Q9H8R3
RKHLKGPLTRKCVGAS

SEQ ID NO: 31389 - protein, 16 aa, Homo sapiens
  ( 347 )...( 362 ): >Q9H8R3
KHLKGPLTRKCVGASQ

SEQ ID NO: 31390 - protein, 16 aa, Homo sapiens
  ( 559 )...( 574 ): >Q9H8R3
EKAAERSRKAPPIPLK

SEQ ID NO: 31391 - protein, 16 aa, Homo sapiens
  ( 560 )...( 575 ): >Q9H8R3
KAAERSRKAPPIPLKL

SEQ ID NO: 31392 - protein, 16 aa, Homo sapiens
  ( 561 )...( 576 ): >Q9H8R3
AAERSRKAPPIPLKLK

SEQ ID NO: 31393 - protein, 16 aa, Homo sapiens
  ( 562 )...( 577 ): >Q9H8R3
AERSRKAPPIPLKLKP

SEQ ID NO: 31394 - protein, 16 aa, Homo sapiens
  ( 647 )...( 662 ): >Q9H8R3
QADKLIGQKNLLTRKR

SEQ ID NO: 31395 - protein, 16 aa, Homo sapiens
  ( 648 )...( 663 ): >Q9H8R3
ADKLIGQKNLLTRKRN

SEQ ID NO: 31396 - protein, 16 aa, Homo sapiens
  ( 649 )...( 664 ): >Q9H8R3
DKLIGQKNLLTRKRNI

SEQ ID NO: 31397 - protein, 16 aa, Homo sapiens
  ( 650 )...( 665 ): >Q9H8R3
KLIGQKNLLTRKRNIL

SEQ ID NO: 31398 - protein, 16 aa, Homo sapiens
  ( 651 )...( 666 ): >Q9H8R3
LIGQKNLLTRKRNILI

SEQ ID NO: 31399 - protein, 16 aa, Homo sapiens
  ( 652 )...( 667 ): >Q9H8R3
IGQKNLLTRKRNILIR

SEQ ID NO: 31400 - protein, 16 aa, Homo sapiens
  ( 656 )...( 671 ): >Q9H8R3
NLLTRKRNILIRKVSS

SEQ ID NO: 31401 - protein, 16 aa, Homo sapiens
  ( 657 )...( 672 ): >Q9H8R3
LLTRKRNILIRKVSSL

SEQ ID NO: 31402 - protein, 16 aa, Homo sapiens
  ( 658 )...( 673 ): >Q9H8R3
LTRKRNILIRKVSSLS

SEQ ID NO: 31403 - protein, 16 aa, Homo sapiens
  ( 659 )...( 674 ): >Q9H8R3
TRKRNILIRKVSSLSG

SEQ ID NO: 31404 - protein, 16 aa, Homo sapiens
  ( 660 )...( 675 ): >Q9H8R3
RKRNILIRKVSSLSGK

SEQ ID NO: 31405 - protein, 16 aa, Homo sapiens
  ( 661 )...( 676 ): >Q9H8R3
KRNILIRKVSSLSGKT

SEQ ID NO: 31406 - protein, 16 aa, Homo sapiens
  ( 662 )...( 677 ): >Q9H8R3
RNILIRKVSSLSGKTE

SEQ ID NO: 31407 - protein, 16 aa, Homo sapiens
  ( 34 )...( 49 ): >Q9NQ87
STPSSSQMQARKKRRG

SEQ ID NO: 31408 - protein, 16 aa, Homo sapiens
  ( 35 )...( 50 ): >Q9NQ87
TPSSSQMQARKKRRGI

SEQ ID NO: 31409 - protein, 16 aa, Homo sapiens
  ( 36 )...( 51 ): >Q9NQ87
PSSSQMQARKKRRGII

SEQ ID NO: 31410 - protein, 16 aa, Homo sapiens
  ( 37 )...( 52 ): >Q9NQ87
SSSQMQARKKRRGIIE

SEQ ID NO: 31411 - protein, 16 aa, Homo sapiens
  ( 38 )...( 53 ): >Q9NQ87
SSQMQARKKRRGIIEK

SEQ ID NO: 31412 - protein, 16 aa, Homo sapiens
  ( 49 )...( 64 ): >Q9NQ87
GIIEKRRRDRINSSLS

SEQ ID NO: 31413 - protein, 16 aa, Homo sapiens
  ( 66 )...( 81 ): >Q9NQ87
LRRLVPTAFEKQGSSK

SEQ ID NO: 31414 - protein, 16 aa, Homo sapiens
  ( 67 )...( 82 ): >Q9NQ87
RRLVPTAFEKQGSSKL

SEQ ID NO: 31415 - protein, 16 aa, Homo sapiens
  ( 211 )...( 226 ): >Q9NQ87
AYPIPALRTAPLRRAT

SEQ ID NO: 31416 - protein, 16 aa, Homo sapiens
  ( 212 )...( 227 ): >Q9NQ87
YPIPALRTAPLRRATG

SEQ ID NO: 31417 - protein, 16 aa, Homo sapiens
  ( 213 )...( 228 ): >Q9NQ87
PIPALRTAPLRRATGI

SEQ ID NO: 31418 - protein, 16 aa, Homo sapiens
  ( 214 )...( 229 ): >Q9NQ87
IPALRTAPLRRATGII

SEQ ID NO: 31419 - protein, 16 aa, Homo sapiens
  ( 215 )...( 230 ): >Q9NQ87
PALRTAPLRRATGIIL

SEQ ID NO: 31420 - protein, 16 aa, Homo sapiens
  ( 216 )...( 231 ): >Q9NQ87
ALRTAPLRRATGIILP

SEQ ID NO: 31421 - protein, 16 aa, Homo sapiens
  ( 217 )...( 232 ): >Q9NQ87
LRTAPLRRATGIILPA

SEQ ID NO: 31422 - protein, 16 aa, Homo sapiens
  ( 218 )...( 233 ): >Q9NQ87
RTAPLRRATGIILPAR

SEQ ID NO: 31423 - protein, 16 aa, Homo sapiens
  ( 219 )...( 234 ): >Q9NQ87
TAPLRRATGIILPARR

SEQ ID NO: 31424 - protein, 16 aa, Homo sapiens
  ( 220 )...( 235 ): >Q9NQ87
APLRRATGIILPARRN

SEQ ID NO: 31425 - protein, 16 aa, Homo sapiens
  ( 221 )...( 236 ): >Q9NQ87
PLRRATGIILPARRNV

SEQ ID NO: 31426 - protein, 16 aa, Homo sapiens
  ( 222 )...( 237 ): >Q9NQ87
LRRATGIILPARRNVL

SEQ ID NO: 31427 - protein, 16 aa, Homo sapiens
  ( 223 )...( 238 ): >Q9NQ87
RRATGIILPARRNVLP

SEQ ID NO: 31428 - protein, 16 aa, Homo sapiens
  ( 224 )...( 239 ): >Q9NQ87
RATGIILPARRNVLPS

SEQ ID NO: 31429 - protein, 16 aa, Homo sapiens
  ( 225 )...( 240 ): >Q9NQ87
ATGIILPARRNVLPSR

SEQ ID NO: 31430 - protein, 16 aa, Homo sapiens
  ( 226 )...( 241 ): >Q9NQ87
TGIILPARRNVLPSRG

SEQ ID NO: 31431 - protein, 16 aa, Homo sapiens
  ( 227 )...( 242 ): >Q9NQ87
GIILPARRNVLPSRGA

SEQ ID NO: 31432 - protein, 16 aa, Homo sapiens
  ( 228 )...( 243 ): >Q9NQ87
IILPARRNVLPSRGAS

SEQ ID NO: 31433 - protein, 16 aa, Homo sapiens
  ( 232 )...( 247 ): >Q9NQ87
ARRNVLPSRGASSTRR

SEQ ID NO: 31434 - protein, 16 aa, Homo sapiens
  ( 233 )...( 248 ): >Q9NQ87
RRNVLPSRGASSTRRA

SEQ ID NO: 31435 - protein, 16 aa, Homo sapiens
  ( 234 )...( 249 ): >Q9NQ87
RNVLPSRGASSTRRAR

SEQ ID NO: 31436 - protein, 16 aa, Homo sapiens
  ( 236 )...( 251 ): >Q9NQ87
VLPSRGASSTRRARPL

SEQ ID NO: 31437 - protein, 16 aa, Homo sapiens
  ( 237 )...( 252 ): >Q9NQ87
LPSRGASSTRRARPLE

SEQ ID NO: 31438 - protein, 16 aa, Homo sapiens
  ( 238 )...( 253 ): >Q9NQ87
PSRGASSTRRARPLER

SEQ ID NO: 31439 - protein, 16 aa, Homo sapiens
  ( 239 )...( 254 ): >Q9NQ87
SRGASSTRRARPLERP

SEQ ID NO: 31440 - protein, 16 aa, Homo sapiens
  ( 240 )...( 255 ): >Q9NQ87
RGASSTRRARPLERPA

SEQ ID NO: 31441 - protein, 16 aa, Homo sapiens
  ( 241 )...( 256 ): >Q9NQ87
GASSTRRARPLERPAT

SEQ ID NO: 31442 - protein, 16 aa, Homo sapiens
  ( 243 )...( 258 ): >Q9NQ87
SSTRRARPLERPATPV

SEQ ID NO: 31443 - protein, 16 aa, Homo sapiens
  ( 244 )...( 259 ): >Q9NQ87
STRRARPLERPATPVP

SEQ ID NO: 31444 - protein, 16 aa, Homo sapiens
  ( 245 )...( 260 ): >Q9NQ87
TRRARPLERPATPVPV

SEQ ID NO: 31445 - protein, 16 aa, Homo sapiens
  ( 246 )...( 261 ): >Q9NQ87
RRARPLERPATPVPVA

SEQ ID NO: 31446 - protein, 16 aa, Homo sapiens
  ( 39 )...( 54 ): >Q96ME3
GPIHRRKKRPPQAPGA

SEQ ID NO: 31447 - protein, 16 aa, Homo sapiens
  ( 71 )...( 86 ): >Q96ME3
AQLKRCLERLKQQMPL

SEQ ID NO: 31448 - protein, 16 aa, Homo sapiens
  ( 72 )...( 87 ): >Q96ME3
QLKRCLERLKQQMPLG

SEQ ID NO: 31449 - protein, 16 aa, Homo sapiens
  ( 73 )...( 88 ): >Q96ME3
LKRCLERLKQQMPLGA

SEQ ID NO: 31450 - protein, 16 aa, Homo sapiens
  ( 88 )...( 103 ): >Q96ME3
ADCARYTTLSLLRRAR

SEQ ID NO: 31451 - protein, 16 aa, Homo sapiens
  ( 89 )...( 104 ): >Q96ME3
DCARYTTLSLLRRARM

SEQ ID NO: 31452 - protein, 16 aa, Homo sapiens
  ( 90 )...( 105 ): >Q96ME3
CARYTTLSLLRRARMH

SEQ ID NO: 31453 - protein, 16 aa, Homo sapiens
  ( 91 )...( 106 ): >Q96ME3
ARYTTLSLLRRARMHI

SEQ ID NO: 31454 - protein, 16 aa, Homo sapiens
  ( 93 )...( 108 ): >Q96ME3
YTTLSLLRRARMHIQK

SEQ ID NO: 31455 - protein, 16 aa, Homo sapiens
  ( 94 )...( 109 ): >Q96ME3
TTLSLLRRARMHIQKL

SEQ ID NO: 31456 - protein, 16 aa, Homo sapiens
  ( 95 )...( 110 ): >Q96ME3
TLSLLRRARMHIQKLE

SEQ ID NO: 31457 - protein, 16 aa, Homo sapiens
  ( 62 )...( 77 ): >Q8NFQ3
RQLLLQQQTSGLKSPK

SEQ ID NO: 31458 - protein, 16 aa, Homo sapiens
  ( 97 )...( 112 ): >O75321
ACKACKRKTTNADRRK

SEQ ID NO: 31459 - protein, 16 aa, Homo sapiens
  ( 98 )...( 113 ): >O75321
CKACKRKTTNADRRKA

SEQ ID NO: 31460 - protein, 16 aa, Homo sapiens
  ( 99 )...( 114 ): >O75321
KACKRKTTNADRRKAA

SEQ ID NO: 31461 - protein, 16 aa, Homo sapiens
  ( 100 )...( 115 ): >O75321
ACKRKTTNADRRKAAT

SEQ ID NO: 31462 - protein, 16 aa, Homo sapiens
  ( 101 )...( 116 ): >O75321
CKRKTTNADRRKAATM

SEQ ID NO: 31463 - protein, 16 aa, Homo sapiens
  ( 113 )...( 128 ): >O75321
AATMRERRRLSKVNEA

SEQ ID NO: 31464 - protein, 16 aa, Homo sapiens
  ( 61 )...( 76 ): >Q8N6B5
RQLLLQQQTSGLKSPK

SEQ ID NO: 31465 - protein, 16 aa, Homo sapiens
  ( 96 )...( 111 ): >Q8TBI7
AEGERPKKGGPKKRKM

SEQ ID NO: 31466 - protein, 16 aa, Homo sapiens
  ( 97 )...( 112 ): >Q8TBI7
EGERPKKGGPKKRKMT

SEQ ID NO: 31467 - protein, 16 aa, Homo sapiens
  ( 98 )...( 113 ): >Q8TBI7
GERPKKGGPKKRKMTK

SEQ ID NO: 31468 - protein, 16 aa, Homo sapiens
  ( 99 )...( 114 ): >Q8TBI7
ERPKKGGPKKRKMTKA

SEQ ID NO: 31469 - protein, 16 aa, Homo sapiens
  ( 102 )...( 117 ): >Q8TBI7
KKGGPKKRKMTKARLE

SEQ ID NO: 31470 - protein, 16 aa, Homo sapiens
  ( 104 )...( 119 ): >Q8TBI7
GGPKKRKMTKARLERS

SEQ ID NO: 31471 - protein, 16 aa, Homo sapiens
  ( 141 )...( 156 ): >Q8TBI7
LDNLRKVVPCYSKTQK

SEQ ID NO: 31472 - protein, 16 aa, Homo sapiens
  ( 142 )...( 157 ): >Q8TBI7
DNLRKVVPCYSKTQKL

SEQ ID NO: 31473 - protein, 16 aa, Homo sapiens
  ( 143 )...( 158 ): >Q8TBI7
NLRKVVPCYSKTQKLS

SEQ ID NO: 31474 - protein, 16 aa, Homo sapiens
  ( 144 )...( 159 ): >Q8TBI7
LRKVVPCYSKTQKLSK

SEQ ID NO: 31475 - protein, 16 aa, Homo sapiens
  ( 145 )...( 160 ): >Q8TBI7
RKVVPCYSKTQKLSKI

SEQ ID NO: 31476 - protein, 16 aa, Homo sapiens
  ( 152 )...( 167 ): >Q8TBI7
SKTQKLSKIETLRLAK

SEQ ID NO: 31477 - protein, 16 aa, Homo sapiens
  ( 153 )...( 168 ): >Q8TBI7
KTQKLSKIETLRLAKN

SEQ ID NO: 31478 - protein, 16 aa, Homo sapiens
  ( 155 )...( 170 ): >Q8TBI7
QKLSKIETLRLAKNYI

SEQ ID NO: 31479 - protein, 16 aa, Homo sapiens
  ( 519 )...( 534 ): >Q8WWU4
QQHQEGKRLRRVACTC

SEQ ID NO: 31480 - protein, 16 aa, Homo sapiens
  ( 520 )...( 535 ): >Q8WWU4
QHQEGKRLRRVACTCP

SEQ ID NO: 31481 - protein, 16 aa, Homo sapiens
  ( 538 )...( 553 ): >Q8WWU4
KEGGGRGTNLGKKKQH

SEQ ID NO: 31482 - protein, 16 aa, Homo sapiens
  ( 541 )...( 556 ): >Q8WWU4
GGRGTNLGKKKQHICH

SEQ ID NO: 31483 - protein, 16 aa, Homo sapiens
  ( 542 )...( 557 ): >Q8WWU4
GRGTNLGKKKQHICHI

SEQ ID NO: 31484 - protein, 16 aa, Homo sapiens
  ( 543 )...( 558 ): >Q8WWU4
RGTNLGKKKQHICHIP

SEQ ID NO: 31485 - protein, 16 aa, Homo sapiens
  ( 560 )...( 575 ): >Q8WWU4
CGKVYGKTSHLRAHLR

SEQ ID NO: 31486 - protein, 16 aa, Homo sapiens
  ( 561 )...( 576 ): >Q8WWU4
GKVYGKTSHLRAHLRW

SEQ ID NO: 31487 - protein, 16 aa, Homo sapiens
  ( 1 )...( 16 ): >Q8WXA1
MALGLQRARSTTELRK

SEQ ID NO: 31488 - protein, 16 aa, Homo sapiens
  ( 3 )...( 18 ): >Q8WXA1
LGLQRARSTTELRKEK

SEQ ID NO: 31489 - protein, 16 aa, Homo sapiens
  ( 4 )...( 19 ): >Q8WXA1
GLQRARSTTELRKEKS

SEQ ID NO: 31490 - protein, 16 aa, Homo sapiens
  ( 53 )...( 68 ): >Q8WXA1
KASIMRLTISYLRMHR

SEQ ID NO: 31491 - protein, 16 aa, Homo sapiens
  ( 54 )...( 69 ): >Q8WXA1
ASIMRLTISYLRMHRL

SEQ ID NO: 31492 - protein, 16 aa, Homo sapiens
  ( 55 )...( 70 ): >Q8WXA1
SIMRLTISYLRMHRLC

SEQ ID NO: 31493 - protein, 16 aa, Homo sapiens
  ( 56 )...( 71 ): >Q8WXA1
IMRLTISYLRMHRLCA

SEQ ID NO: 31494 - protein, 16 aa, Homo sapiens
  ( 57 )...( 72 ): >Q8WXA1
MRLTISYLRMHRLCAA

SEQ ID NO: 31495 - protein, 16 aa, Homo sapiens
  ( 58 )...( 73 ): >Q8WXA1
RLTISYLRMHRLCAAG

SEQ ID NO: 31496 - protein, 16 aa, Homo sapiens
  ( 160 )...( 175 ): >Q8WXA1
TERCFSLRMKSTLTSR

SEQ ID NO: 31497 - protein, 16 aa, Homo sapiens
  ( 161 )...( 176 ): >Q8WXA1
ERCFSLRMKSTLTSRG

SEQ ID NO: 31498 - protein, 16 aa, Homo sapiens
  ( 162 )...( 177 ): >Q8WXA1
RCFSLRMKSTLTSRGR

SEQ ID NO: 31499 - protein, 16 aa, Homo sapiens
  ( 163 )...( 178 ): >Q8WXA1
CFSLRMKSTLTSRGRT

SEQ ID NO: 31500 - protein, 16 aa, Homo sapiens
  ( 164 )...( 179 ): >Q8WXA1
FSLRMKSTLTSRGRTL

SEQ ID NO: 31501 - protein, 16 aa, Homo sapiens
  ( 165 )...( 180 ): >Q8WXA1
SLRMKSTLTSRGRTLN

SEQ ID NO: 31502 - protein, 16 aa, Homo sapiens
  ( 166 )...( 181 ): >Q8WXA1
LRMKSTLTSRGRTLNL

SEQ ID NO: 31503 - protein, 16 aa, Homo sapiens
  ( 167 )...( 182 ): >Q8WXA1
RMKSTLTSRGRTLNLK

SEQ ID NO: 31504 - protein, 16 aa, Homo sapiens
  ( 168 )...( 183 ): >Q8WXA1
MKSTLTSRGRTLNLKA

SEQ ID NO: 31505 - protein, 16 aa, Homo sapiens
  ( 169 )...( 184 ): >Q8WXA1
KSTLTSRGRTLNLKAA

SEQ ID NO: 31506 - protein, 16 aa, Homo sapiens
  ( 171 )...( 186 ): >Q8WXA1
TLTSRGRTLNLKAATW

SEQ ID NO: 31507 - protein, 16 aa, Homo sapiens
  ( 172 )...( 187 ): >Q8WXA1
LTSRGRTLNLKAATWK

SEQ ID NO: 31508 - protein, 16 aa, Homo sapiens
  ( 173 )...( 188 ): >Q8WXA1
TSRGRTLNLKAATWKV

SEQ ID NO: 31509 - protein, 16 aa, Homo sapiens
  ( 174 )...( 189 ): >Q8WXA1
SRGRTLNLKAATWKVL

SEQ ID NO: 31510 - protein, 16 aa, Homo sapiens
  ( 175 )...( 190 ): >Q8WXA1
RGRTLNLKAATWKVLN

SEQ ID NO: 31511 - protein, 16 aa, Homo sapiens
  ( 294 )...( 309 ): >Q8WXA1
LSKGQAVTGQYRFLAR

SEQ ID NO: 31512 - protein, 16 aa, Homo sapiens
  ( 295 )...( 310 ): >Q8WXA1
SKGQAVTGQYRFLARS

SEQ ID NO: 31513 - protein, 16 aa, Homo sapiens
  ( 296 )...( 311 ): >Q8WXA1
KGQAVTGQYRFLARSG

SEQ ID NO: 31514 - protein, 16 aa, Homo sapiens
  ( 407 )...( 422 ): >Q8WXA1
RRFCSPDLRRLLGPIL

SEQ ID NO: 31515 - protein, 16 aa, Homo sapiens
  ( 1 )...( 16 ): >Q9HAZ3
MIPPGECTYAGRKRRR

SEQ ID NO: 31516 - protein, 16 aa, Homo sapiens
  ( 4 )...( 19 ): >Q9HAZ3
PGECTYAGRKRRRPLQ

SEQ ID NO: 31517 - protein, 16 aa, Homo sapiens
  ( 5 )...( 20 ): >Q9HAZ3
GECTYAGRKRRRPLQK

SEQ ID NO: 31518 - protein, 16 aa, Homo sapiens
  ( 15 )...( 30 ): >Q9HAZ3
RRPLQKQRPAVGAEKS

SEQ ID NO: 31519 - protein, 16 aa, Homo sapiens
  ( 16 )...( 31 ): >Q9HAZ3
RPLQKQRPAVGAEKSN

SEQ ID NO: 31520 - protein, 16 aa, Homo sapiens
  ( 20 )...( 35 ): >Q9HAZ3
KQRPAVGAEKSNPSKR

SEQ ID NO: 31521 - protein, 16 aa, Homo sapiens
  ( 60 )...( 75 ): >Q9HAZ3
KLDKLSVLRLSVSYLR

SEQ ID NO: 31522 - protein, 16 aa, Homo sapiens
  ( 62 )...( 77 ): >Q9HAZ3
DKLSVLRLSVSYLRVK

SEQ ID NO: 31523 - protein, 16 aa, Homo sapiens
  ( 63 )...( 78 ): >Q9HAZ3
KLSVLRLSVSYLRVKS

SEQ ID NO: 31524 - protein, 16 aa, Homo sapiens
  ( 64 )...( 79 ): >Q9HAZ3
LSVLRLSVSYLRVKSF

SEQ ID NO: 31525 - protein, 16 aa, Homo sapiens
  ( 65 )...( 80 ): >Q9HAZ3
SVLRLSVSYLRVKSFF

SEQ ID NO: 31526 - protein, 16 aa, Homo sapiens
  ( 66 )...( 81 ): >Q9HAZ3
VLRLSVSYLRVKSFFQ

SEQ ID NO: 31527 - protein, 16 aa, Homo sapiens
  ( 67 )...( 82 ): >Q9HAZ3
LRLSVSYLRVKSFFQV

SEQ ID NO: 31528 - protein, 16 aa, Homo sapiens
  ( 68 )...( 83 ): >Q9HAZ3
RLSVSYLRVKSFFQVV

SEQ ID NO: 31529 - protein, 16 aa, Homo sapiens
  ( 254 )...( 269 ): >Q9HAZ3
MTMQFQGKLKFLFGQK

SEQ ID NO: 31530 - protein, 16 aa, Homo sapiens
  ( 255 )...( 270 ): >Q9HAZ3
TMQFQGKLKFLFGQKK

SEQ ID NO: 31531 - protein, 16 aa, Homo sapiens
  ( 257 )...( 272 ): >Q9HAZ3
QFQGKLKFLFGQKKKA

SEQ ID NO: 31532 - protein, 16 aa, Homo sapiens
  ( 258 )...( 273 ): >Q9HAZ3
FQGKLKFLFGQKKKAP

SEQ ID NO: 31533 - protein, 16 aa, Homo sapiens
  ( 259 )...( 274 ): >Q9HAZ3
QGKLKFLFGQKKKAPS

SEQ ID NO: 31534 - protein, 16 aa, Homo sapiens
  ( 260 )...( 275 ): >Q9HAZ3
GKLKFLFGQKKKAPSG

SEQ ID NO: 31535 - protein, 16 aa, Homo sapiens
  ( 261 )...( 276 ): >Q9HAZ3
KLKFLFGQKKKAPSGA

SEQ ID NO: 31536 - protein, 16 aa, Homo sapiens
  ( 296 )...( 311 ): >Q9HAZ3
AAEMKMRSALLRAKPR

SEQ ID NO: 31537 - protein, 16 aa, Homo sapiens
  ( 297 )...( 312 ): >Q9HAZ3
AEMKMRSALLRAKPRA

SEQ ID NO: 31538 - protein, 16 aa, Homo sapiens
  ( 298 )...( 313 ): >Q9HAZ3
EMKMRSALLRAKPRAD

SEQ ID NO: 31539 - protein, 16 aa, Homo sapiens
  ( 299 )...( 314 ): >Q9HAZ3
MKMRSALLRAKPRADT

SEQ ID NO: 31540 - protein, 16 aa, Homo sapiens
  ( 300 )...( 315 ): >Q9HAZ3
KMRSALLRAKPRADTA

SEQ ID NO: 31541 - protein, 16 aa, Homo sapiens
  ( 302 )...( 317 ): >Q9HAZ3
RSALLRAKPRADTAAT

SEQ ID NO: 31542 - protein, 16 aa, Homo sapiens
  ( 394 )...( 409 ): >Q9HAZ3
EQHRMLSRASGVTGRR

SEQ ID NO: 31543 - protein, 16 aa, Homo sapiens
  ( 395 )...( 410 ): >Q9HAZ3
QHRMLSRASGVTGRRE

SEQ ID NO: 31544 - protein, 16 aa, Homo sapiens
  ( 396 )...( 411 ): >Q9HAZ3
HRMLSRASGVTGRRET

SEQ ID NO: 31545 - protein, 16 aa, Homo sapiens
  ( 397 )...( 412 ): >Q9HAZ3
RMLSRASGVTGRRETP

SEQ ID NO: 31546 - protein, 16 aa, Homo sapiens
  ( 401 )...( 416 ): >Q9HAZ3
RASGVTGRRETPGPTK

SEQ ID NO: 31547 - protein, 16 aa, Homo sapiens
  ( 609 )...( 624 ): >Q9HAZ3
VRGAQPHGRATAGRSR

SEQ ID NO: 31548 - protein, 16 aa, Homo sapiens
  ( 610 )...( 625 ): >Q9HAZ3
RGAQPHGRATAGRSRE

SEQ ID NO: 31549 - protein, 16 aa, Homo sapiens
  ( 249 )...( 264 ): >Q8TAT1
RPDREKGKGAGASRVT

SEQ ID NO: 31550 - protein, 16 aa, Homo sapiens
  ( 251 )...( 266 ): >Q8TAT1
DREKGKGAGASRVTIK

SEQ ID NO: 31551 - protein, 16 aa, Homo sapiens
  ( 252 )...( 267 ): >Q8TAT1
REKGKGAGASRVTIKQ

SEQ ID NO: 31552 - protein, 16 aa, Homo sapiens
  ( 136 )...( 151 ): >Q8WYA4
QCNPMARKLDKLTVLR

SEQ ID NO: 31553 - protein, 16 aa, Homo sapiens
  ( 137 )...( 152 ): >Q8WYA4
CNPMARKLDKLTVLRM

SEQ ID NO: 31554 - protein, 16 aa, Homo sapiens
  ( 138 )...( 153 ): >Q8WYA4
NPMARKLDKLTVLRMA

SEQ ID NO: 31555 - protein, 16 aa, Homo sapiens
  ( 139 )...( 154 ): >Q8WYA4
PMARKLDKLTVLRMAV

SEQ ID NO: 31556 - protein, 16 aa, Homo sapiens
  ( 140 )...( 155 ): >Q8WYA4
MARKLDKLTVLRMAVQ

SEQ ID NO: 31557 - protein, 16 aa, Homo sapiens
  ( 141 )...( 156 ): >Q8WYA4
ARKLDKLTVLRMAVQH

SEQ ID NO: 31558 - protein, 16 aa, Homo sapiens
  ( 142 )...( 157 ): >Q8WYA4
RKLDKLTVLRMAVQHL

SEQ ID NO: 31559 - protein, 16 aa, Homo sapiens
  ( 143 )...( 158 ): >Q8WYA4
KLDKLTVLRMAVQHLR

SEQ ID NO: 31560 - protein, 16 aa, Homo sapiens
  ( 146 )...( 161 ): >Q8WYA4
KLTVLRMAVQHLRSLK

SEQ ID NO: 31561 - protein, 16 aa, Homo sapiens
  ( 147 )...( 162 ): >Q8WYA4
LTVLRMAVQHLRSLKG

SEQ ID NO: 31562 - protein, 16 aa, Homo sapiens
  ( 148 )...( 163 ): >Q8WYA4
TVLRMAVQHLRSLKGL

SEQ ID NO: 31563 - protein, 16 aa, Homo sapiens
  ( 149 )...( 164 ): >Q8WYA4
VLRMAVQHLRSLKGLT

SEQ ID NO: 31564 - protein, 16 aa, Homo sapiens
  ( 150 )...( 165 ): >Q8WYA4
LRMAVQHLRSLKGLTN

SEQ ID NO: 31565 - protein, 16 aa, Homo sapiens
  ( 151 )...( 166 ): >Q8WYA4
RMAVQHLRSLKGLTNS

SEQ ID NO: 31566 - protein, 16 aa, Homo sapiens
  ( 201 )...( 216 ): >Q8WYA4
RGKILFVSKSVSKILN

SEQ ID NO: 31567 - protein, 16 aa, Homo sapiens
  ( 265 )...( 280 ): >Q8WYA4
SNLHAGRTRVYSGSRR

SEQ ID NO: 31568 - protein, 16 aa, Homo sapiens
  ( 266 )...( 281 ): >Q8WYA4
NLHAGRTRVYSGSRRS

SEQ ID NO: 31569 - protein, 16 aa, Homo sapiens
  ( 267 )...( 282 ): >Q8WYA4
LHAGRTRVYSGSRRSF

SEQ ID NO: 31570 - protein, 16 aa, Homo sapiens
  ( 268 )...( 283 ): >Q8WYA4
HAGRTRVYSGSRRSFF

SEQ ID NO: 31571 - protein, 16 aa, Homo sapiens
  ( 113 )...( 128 ): >Q9UIG2
VLRNFGTVLRLSPFRF

SEQ ID NO: 31572 - protein, 16 aa, Homo sapiens
  ( 502 )...( 517 ): >Q9UIG2
GKGASGSTRIITRLRN

SEQ ID NO: 31573 - protein, 16 aa, Homo sapiens
  ( 503 )...( 518 ): >Q9UIG2
KGASGSTRIITRLRNP

SEQ ID NO: 31574 - protein, 16 aa, Homo sapiens
  ( 506 )...( 521 ): >Q9UIG2
SGSTRIITRLRNPDSK

SEQ ID NO: 31575 - protein, 16 aa, Homo sapiens
  ( 507 )...( 522 ): >Q9UIG2
GSTRIITRLRNPDSKL

SEQ ID NO: 31576 - protein, 16 aa, Homo sapiens
  ( 508 )...( 523 ): >Q9UIG2
STRIITRLRNPDSKLS

SEQ ID NO: 31577 - protein, 16 aa, Homo sapiens
  ( 509 )...( 524 ): >Q9UIG2
TRIITRLRNPDSKLSQ

SEQ ID NO: 31578 - protein, 16 aa, Homo sapiens
  ( 511 )...( 526 ): >Q9UIG2
IITRLRNPDSKLSQLK

SEQ ID NO: 31579 - protein, 16 aa, Homo sapiens
  ( 512 )...( 527 ): >Q9UIG2
ITRLRNPDSKLSQLKS

SEQ ID NO: 31580 - protein, 16 aa, Homo sapiens
  ( 558 )...( 573 ): >Q9UIG2
RLSTKKEVIMKGNINN

SEQ ID NO: 31581 - protein, 16 aa, Homo sapiens
  ( 908 )...( 923 ): >Q9UIG2
LRTSYKKKTKSSKLDG

SEQ ID NO: 31582 - protein, 16 aa, Homo sapiens
  ( 909 )...( 924 ): >Q9UIG2
RTSYKKKTKSSKLDGL

SEQ ID NO: 31583 - protein, 16 aa, Homo sapiens
  ( 912 )...( 927 ): >Q9UIG2
YKKKTKSSKLDGLLER

SEQ ID NO: 31584 - protein, 16 aa, Homo sapiens
  ( 913 )...( 928 ): >Q9UIG2
KKKTKSSKLDGLLERR

SEQ ID NO: 31585 - protein, 16 aa, Homo sapiens
  ( 914 )...( 929 ): >Q9UIG2
KKTKSSKLDGLLERRI

SEQ ID NO: 31586 - protein, 16 aa, Homo sapiens
  ( 915 )...( 930 ): >Q9UIG2
KTKSSKLDGLLERRIK

SEQ ID NO: 31587 - protein, 16 aa, Homo sapiens
  ( 916 )...( 931 ): >Q9UIG2
TKSSKLDGLLERRIKQ

SEQ ID NO: 31588 - protein, 16 aa, Homo sapiens
  ( 917 )...( 932 ): >Q9UIG2
KSSKLDGLLERRIKQF

SEQ ID NO: 31589 - protein, 16 aa, Homo sapiens
  ( 937 )...( 952 ): >Q9UIG2
KQRLEKIKLEGGIKGI

SEQ ID NO: 31590 - protein, 16 aa, Homo sapiens
  ( 939 )...( 954 ): >Q9UIG2
RLEKIKLEGGIKGIGK

SEQ ID NO: 31591 - protein, 16 aa, Homo sapiens
  ( 1209 )...( 1224 ): >Q9UIG2
RLPVKGTEANGKKPSQ

SEQ ID NO: 31592 - protein, 16 aa, Homo sapiens
  ( 1212 )...( 1227 ): >Q9UIG2
VKGTEANGKKPSQQKK

SEQ ID NO: 31593 - protein, 16 aa, Homo sapiens
  ( 1213 )...( 1228 ): >Q9UIG2
KGTEANGKKPSQQKKL

SEQ ID NO: 31594 - protein, 16 aa, Homo sapiens
  ( 1548 )...( 1563 ): >Q9UIG2
KVKLMKFSRPKKTRSG

SEQ ID NO: 31595 - protein, 16 aa, Homo sapiens
  ( 1549 )...( 1564 ): >Q9UIG2
VKLMKFSRPKKTRSGT

SEQ ID NO: 31596 - protein, 16 aa, Homo sapiens
  ( 1550 )...( 1565 ): >Q9UIG2
KLMKFSRPKKTRSGTA

SEQ ID NO: 31597 - protein, 16 aa, Homo sapiens
  ( 1551 )...( 1566 ): >Q9UIG2
LMKFSRPKKTRSGTAL

SEQ ID NO: 31598 - protein, 16 aa, Homo sapiens
  ( 1552 )...( 1567 ): >Q9UIG2
MKFSRPKKTRSGTALP

SEQ ID NO: 31599 - protein, 16 aa, Homo sapiens
  ( 1553 )...( 1568 ): >Q9UIG2
KFSRPKKTRSGTALPS

SEQ ID NO: 31600 - protein, 16 aa, Homo sapiens
  ( 1555 )...( 1570 ): >Q9UIG2
SRPKKTRSGTALPSYR

SEQ ID NO: 31601 - protein, 16 aa, Homo sapiens
  ( 1556 )...( 1571 ): >Q9UIG2
RPKKTRSGTALPSYRK

SEQ ID NO: 31602 - protein, 16 aa, Homo sapiens
  ( 1557 )...( 1572 ): >Q9UIG2
PKKTRSGTALPSYRKF

SEQ ID NO: 31603 - protein, 16 aa, Homo sapiens
  ( 1558 )...( 1573 ): >Q9UIG2
KKTRSGTALPSYRKFV

SEQ ID NO: 31604 - protein, 16 aa, Homo sapiens
  ( 1559 )...( 1574 ): >Q9UIG2
KTRSGTALPSYRKFVT

SEQ ID NO: 31605 - protein, 16 aa, Homo sapiens
  ( 1560 )...( 1575 ): >Q9UIG2
TRSGTALPSYRKFVTK

SEQ ID NO: 31606 - protein, 16 aa, Homo sapiens
  ( 1561 )...( 1576 ): >Q9UIG2
RSGTALPSYRKFVTKS

SEQ ID NO: 31607 - protein, 16 aa, Homo sapiens
  ( 1563 )...( 1578 ): >Q9UIG2
GTALPSYRKFVTKSTK

SEQ ID NO: 31608 - protein, 16 aa, Homo sapiens
  ( 1564 )...( 1579 ): >Q9UIG2
TALPSYRKFVTKSTKK

SEQ ID NO: 31609 - protein, 16 aa, Homo sapiens
  ( 1565 )...( 1580 ): >Q9UIG2
ALPSYRKFVTKSTKKS

SEQ ID NO: 31610 - protein, 16 aa, Homo sapiens
  ( 1566 )...( 1581 ): >Q9UIG2
LPSYRKFVTKSTKKSI

SEQ ID NO: 31611 - protein, 16 aa, Homo sapiens
  ( 1568 )...( 1583 ): >Q9UIG2
SYRKFVTKSTKKSIFV

SEQ ID NO: 31612 - protein, 16 aa, Homo sapiens
  ( 1569 )...( 1584 ): >Q9UIG2
YRKFVTKSTKKSIFVL

SEQ ID NO: 31613 - protein, 16 aa, Homo sapiens
  ( 1570 )...( 1585 ): >Q9UIG2
RKFVTKSTKKSIFVLP

SEQ ID NO: 31614 - protein, 16 aa, Homo sapiens
  ( 1571 )...( 1586 ): >Q9UIG2
KFVTKSTKKSIFVLPN

SEQ ID NO: 31615 - protein, 16 aa, Homo sapiens
  ( 1584 )...( 1599 ): >Q9UIG2
LPNDDLKKLARKGGIR

SEQ ID NO: 31616 - protein, 16 aa, Homo sapiens
  ( 1588 )...( 1603 ): >Q9UIG2
DLKKLARKGGIREVPY

SEQ ID NO: 31617 - protein, 16 aa, Homo sapiens
  ( 1589 )...( 1604 ): >Q9UIG2
LKKLARKGGIREVPYF

SEQ ID NO: 31618 - protein, 16 aa, Homo sapiens
  ( 1590 )...( 1605 ): >Q9UIG2
KKLARKGGIREVPYFN

SEQ ID NO: 31619 - protein, 16 aa, Homo sapiens
  ( 1591 )...( 1606 ): >Q9UIG2
KLARKGGIREVPYFNY

SEQ ID NO: 31620 - protein, 16 aa, Homo sapiens
  ( 1622 )...( 1637 ): >Q9UIG2
PTFGITWRYRLQTVKS

SEQ ID NO: 31621 - protein, 16 aa, Homo sapiens
  ( 1623 )...( 1638 ): >Q9UIG2
TFGITWRYRLQTVKSL

SEQ ID NO: 31622 - protein, 16 aa, Homo sapiens
  ( 1624 )...( 1639 ): >Q9UIG2
FGITWRYRLQTVKSLA

SEQ ID NO: 31623 - protein, 16 aa, Homo sapiens
  ( 1625 )...( 1640 ): >Q9UIG2
GITWRYRLQTVKSLAG

SEQ ID NO: 31624 - protein, 16 aa, Homo sapiens
  ( 1626 )...( 1641 ): >Q9UIG2
ITWRYRLQTVKSLAGV

SEQ ID NO: 31625 - protein, 16 aa, Homo sapiens
  ( 1627 )...( 1642 ): >Q9UIG2
TWRYRLQTVKSLAGVS

SEQ ID NO: 31626 - protein, 16 aa, Homo sapiens
  ( 1628 )...( 1643 ): >Q9UIG2
WRYRLQTVKSLAGVSL

SEQ ID NO: 31627 - protein, 16 aa, Homo sapiens
  ( 1629 )...( 1644 ): >Q9UIG2
RYRLQTVKSLAGVSLM

SEQ ID NO: 31628 - protein, 16 aa, Homo sapiens
  ( 1631 )...( 1646 ): >Q9UIG2
RLQTVKSLAGVSLMLR

SEQ ID NO: 31629 - protein, 16 aa, Homo sapiens
  ( 1713 )...( 1728 ): >Q9UIG2
KETPTPQRKGLRSSAL

SEQ ID NO: 31630 - protein, 16 aa, Homo sapiens
  ( 1714 )...( 1729 ): >Q9UIG2
ETPTPQRKGLRSSALR

SEQ ID NO: 31631 - protein, 16 aa, Homo sapiens
  ( 1715 )...( 1730 ): >Q9UIG2
TPTPQRKGLRSSALRP

SEQ ID NO: 31632 - protein, 16 aa, Homo sapiens
  ( 1716 )...( 1731 ): >Q9UIG2
PTPQRKGLRSSALRPK

SEQ ID NO: 31633 - protein, 16 aa, Homo sapiens
  ( 1717 )...( 1732 ): >Q9UIG2
TPQRKGLRSSALRPKR

SEQ ID NO: 31634 - protein, 16 aa, Homo sapiens
  ( 1720 )...( 1735 ): >Q9UIG2
RKGLRSSALRPKRPET

SEQ ID NO: 31635 - protein, 16 aa, Homo sapiens
  ( 1721 )...( 1736 ): >Q9UIG2
KGLRSSALRPKRPETP

SEQ ID NO: 31636 - protein, 16 aa, Homo sapiens
  ( 1722 )...( 1737 ): >Q9UIG2
GLRSSALRPKRPETPK

SEQ ID NO: 31637 - protein, 16 aa, Homo sapiens
  ( 1727 )...( 1742 ): >Q9UIG2
ALRPKRPETPKQTGPV

SEQ ID NO: 31638 - protein, 16 aa, Homo sapiens
  ( 1728 )...( 1743 ): >Q9UIG2
LRPKRPETPKQTGPVI

SEQ ID NO: 31639 - protein, 16 aa, Homo sapiens
  ( 1729 )...( 1744 ): >Q9UIG2
RPKRPETPKQTGPVII

SEQ ID NO: 31640 - protein, 16 aa, Homo sapiens
  ( 1775 )...( 1790 ): >Q9UIG2
QQAKKRLEQQKPTVIA

SEQ ID NO: 31641 - protein, 16 aa, Homo sapiens
  ( 1776 )...( 1791 ): >Q9UIG2
QAKKRLEQQKPTVIAT

SEQ ID NO: 31642 - protein, 16 aa, Homo sapiens
  ( 1925 )...( 1940 ): >Q9UIG2
IRTPLQQSTLGKAIIR

SEQ ID NO: 31643 - protein, 16 aa, Homo sapiens
  ( 1926 )...( 1941 ): >Q9UIG2
RTPLQQSTLGKAIIRT

SEQ ID NO: 31644 - protein, 16 aa, Homo sapiens
  ( 2198 )...( 2213 ): >Q9UIG2
GQSPVRVQSPSQTRIR

SEQ ID NO: 31645 - protein, 16 aa, Homo sapiens
  ( 2199 )...( 2214 ): >Q9UIG2
QSPVRVQSPSQTRIRP

SEQ ID NO: 31646 - protein, 16 aa, Homo sapiens
  ( 2200 )...( 2215 ): >Q9UIG2
SPVRVQSPSQTRIRPS

SEQ ID NO: 31647 - protein, 16 aa, Homo sapiens
  ( 2201 )...( 2216 ): >Q9UIG2
PVRVQSPSQTRIRPST

SEQ ID NO: 31648 - protein, 16 aa, Homo sapiens
  ( 2202 )...( 2217 ): >Q9UIG2
VRVQSPSQTRIRPSTP

SEQ ID NO: 31649 - protein, 16 aa, Homo sapiens
  ( 2462 )...( 2477 ): >Q9UIG2
QKRSKQNATKLSALLF

SEQ ID NO: 31650 - protein, 16 aa, Homo sapiens
  ( 2463 )...( 2478 ): >Q9UIG2
KRSKQNATKLSALLFK

SEQ ID NO: 31651 - protein, 16 aa, Homo sapiens
  ( 2464 )...( 2479 ): >Q9UIG2
RSKQNATKLSALLFKH

SEQ ID NO: 31652 - protein, 16 aa, Homo sapiens
  ( 2479 )...( 2494 ): >Q9UIG2
HKEQLRAEILKKRALL

SEQ ID NO: 31653 - protein, 16 aa, Homo sapiens
  ( 2559 )...( 2574 ): >Q9UIG2
LLSTPTLPVASQKRKR

SEQ ID NO: 31654 - protein, 16 aa, Homo sapiens
  ( 2560 )...( 2575 ): >Q9UIG2
LSTPTLPVASQKRKRE

SEQ ID NO: 31655 - protein, 16 aa, Homo sapiens
  ( 2580 )...( 2595 ): >Q9UIG2
SSSKSKKKKMISTTSK

SEQ ID NO: 31656 - protein, 16 aa, Homo sapiens
  ( 2583 )...( 2598 ): >Q9UIG2
KSKKKKMISTTSKETK

SEQ ID NO: 31657 - protein, 16 aa, Homo sapiens
  ( 2584 )...( 2599 ): >Q9UIG2
SKKKKMISTTSKETKK

SEQ ID NO: 31658 - protein, 16 aa, Homo sapiens
  ( 2585 )...( 2600 ): >Q9UIG2
KKKKMISTTSKETKKD

SEQ ID NO: 31659 - protein, 16 aa, Homo sapiens
  ( 2668 )...( 2683 ): >Q9UIG2
YEGLKRVLRSLQAHKM

SEQ ID NO: 31660 - protein, 16 aa, Homo sapiens
  ( 2669 )...( 2684 ): >Q9UIG2
EGLKRVLRSLQAHKMA

SEQ ID NO: 31661 - protein, 16 aa, Homo sapiens
  ( 2670 )...( 2685 ): >Q9UIG2
GLKRVLRSLQAHKMAW

SEQ ID NO: 31662 - protein, 16 aa, Homo sapiens
  ( 2755 )...( 2770 ): >Q9UIG2
LESFFVQKLKGFKASR

SEQ ID NO: 31663 - protein, 16 aa, Homo sapiens
  ( 302 )...( 317 ): >Q8WWU3
QQHQEGKRLRRVACTC

SEQ ID NO: 31664 - protein, 16 aa, Homo sapiens
  ( 303 )...( 318 ): >Q8WWU3
QHQEGKRLRRVACTCP

SEQ ID NO: 31665 - protein, 16 aa, Homo sapiens
  ( 321 )...( 336 ): >Q8WWU3
KEGGGRGTNLGKKKQH

SEQ ID NO: 31666 - protein, 16 aa, Homo sapiens
  ( 324 )...( 339 ): >Q8WWU3
GGRGTNLGKKKQHICH

SEQ ID NO: 31667 - protein, 16 aa, Homo sapiens
  ( 325 )...( 340 ): >Q8WWU3
GRGTNLGKKKQHICHI

SEQ ID NO: 31668 - protein, 16 aa, Homo sapiens
  ( 326 )...( 341 ): >Q8WWU3
RGTNLGKKKQHICHIP

SEQ ID NO: 31669 - protein, 16 aa, Homo sapiens
  ( 343 )...( 358 ): >Q8WWU3
CGKVYGKTSHLRAHLR

SEQ ID NO: 31670 - protein, 16 aa, Homo sapiens
  ( 344 )...( 359 ): >Q8WWU3
GKVYGKTSHLRAHLRW

SEQ ID NO: 31671 - protein, 16 aa, Homo sapiens
  ( 285 )...( 300 ): >Q8WWU2
QQHQEGKRLRRVACTC

SEQ ID NO: 31672 - protein, 16 aa, Homo sapiens
  ( 286 )...( 301 ): >Q8WWU2
QHQEGKRLRRVACTCP

SEQ ID NO: 31673 - protein, 16 aa, Homo sapiens
  ( 304 )...( 319 ): >Q8WWU2
KEGGGRGTNLGKKKQH

SEQ ID NO: 31674 - protein, 16 aa, Homo sapiens
  ( 307 )...( 322 ): >Q8WWU2
GGRGTNLGKKKQHICH

SEQ ID NO: 31675 - protein, 16 aa, Homo sapiens
  ( 308 )...( 323 ): >Q8WWU2
GRGTNLGKKKQHICHI

SEQ ID NO: 31676 - protein, 16 aa, Homo sapiens
  ( 309 )...( 324 ): >Q8WWU2
RGTNLGKKKQHICHIP

SEQ ID NO: 31677 - protein, 16 aa, Homo sapiens
  ( 326 )...( 341 ): >Q8WWU2
CGKVYGKTSHLRAHLR

SEQ ID NO: 31678 - protein, 16 aa, Homo sapiens
  ( 327 )...( 342 ): >Q8WWU2
GKVYGKTSHLRAHLRW

SEQ ID NO: 31679 - protein, 16 aa, Homo sapiens
  ( 59 )...( 74 ): >Q9H323
DKASIIRLTISYLKMR

SEQ ID NO: 31680 - protein, 16 aa, Homo sapiens
  ( 60 )...( 75 ): >Q9H323
KASIIRLTISYLKMRD

SEQ ID NO: 31681 - protein, 16 aa, Homo sapiens
  ( 94 )...( 109 ): >Q9H323
NTSVKGAQRRRSPSAL

SEQ ID NO: 31682 - protein, 16 aa, Homo sapiens
  ( 95 )...( 110 ): >Q9H323
TSVKGAQRRRSPSALA

SEQ ID NO: 31683 - protein, 16 aa, Homo sapiens
  ( 96 )...( 111 ): >Q9H323
SVKGAQRRRSPSALAI

SEQ ID NO: 31684 - protein, 16 aa, Homo sapiens
  ( 97 )...( 112 ): >Q9H323
VKGAQRRRSPSALAIE

SEQ ID NO: 31685 - protein, 16 aa, Homo sapiens
  ( 98 )...( 113 ): >Q9H323
KGAQRRRSPSALAIEV

SEQ ID NO: 31686 - protein, 16 aa, Homo sapiens
  ( 228 )...( 243 ): >Q9H323
ERSFFIRMKSTLTKRG

SEQ ID NO: 31687 - protein, 16 aa, Homo sapiens
  ( 229 )...( 244 ): >Q9H323
RSFFIRMKSTLTKRGV

SEQ ID NO: 31688 - protein, 16 aa, Homo sapiens
  ( 230 )...( 245 ): >Q9H323
SFFIRMKSTLTKRGVH

SEQ ID NO: 31689 - protein, 16 aa, Homo sapiens
  ( 231 )...( 246 ): >Q9H323
FFIRMKSTLTKRGVHI

SEQ ID NO: 31690 - protein, 16 aa, Homo sapiens
  ( 232 )...( 247 ): >Q9H323
FIRMKSTLTKRGVHIK

SEQ ID NO: 31691 - protein, 16 aa, Homo sapiens
  ( 233 )...( 248 ): >Q9H323
IRMKSTLTKRGVHIKS

SEQ ID NO: 31692 - protein, 16 aa, Homo sapiens
  ( 234 )...( 249 ): >Q9H323
RMKSTLTKRGVHIKSS

SEQ ID NO: 31693 - protein, 16 aa, Homo sapiens
  ( 238 )...( 253 ): >Q9H323
TLTKRGVHIKSSGYKV

SEQ ID NO: 31694 - protein, 16 aa, Homo sapiens
  ( 239 )...( 254 ): >Q9H323
LTKRGVHIKSSGYKVI

SEQ ID NO: 31695 - protein, 16 aa, Homo sapiens
  ( 241 )...( 256 ): >Q9H323
KRGVHIKSSGYKVIHI

SEQ ID NO: 31696 - protein, 16 aa, Homo sapiens
  ( 246 )...( 261 ): >Q9H323
IKSSGYKVIHITGRLR

SEQ ID NO: 31697 - protein, 16 aa, Homo sapiens
  ( 247 )...( 262 ): >Q9H323
KSSGYKVIHITGRLRL

SEQ ID NO: 31698 - protein, 16 aa, Homo sapiens
  ( 248 )...( 263 ): >Q9H323
SSGYKVIHITGRLRLR

SEQ ID NO: 31699 - protein, 16 aa, Homo sapiens
  ( 249 )...( 264 ): >Q9H323
SGYKVIHITGRLRLRV

SEQ ID NO: 31700 - protein, 16 aa, Homo sapiens
  ( 250 )...( 265 ): >Q9H323
GYKVIHITGRLRLRVS

SEQ ID NO: 31701 - protein, 16 aa, Homo sapiens
  ( 251 )...( 266 ): >Q9H323
YKVIHITGRLRLRVSL

SEQ ID NO: 31702 - protein, 16 aa, Homo sapiens
  ( 252 )...( 267 ): >Q9H323
KVIHITGRLRLRVSLS

SEQ ID NO: 31703 - protein, 16 aa, Homo sapiens
  ( 253 )...( 268 ): >Q9H323
VIHITGRLRLRVSLSH

SEQ ID NO: 31704 - protein, 16 aa, Homo sapiens
  ( 254 )...( 269 ): >Q9H323
IHITGRLRLRVSLSHG

SEQ ID NO: 31705 - protein, 16 aa, Homo sapiens
  ( 255 )...( 270 ): >Q9H323
HITGRLRLRVSLSHGR

SEQ ID NO: 31706 - protein, 16 aa, Homo sapiens
  ( 256 )...( 271 ): >Q9H323
ITGRLRLRVSLSHGRT

SEQ ID NO: 31707 - protein, 16 aa, Homo sapiens
  ( 257 )...( 272 ): >Q9H323
TGRLRLRVSLSHGRTV

SEQ ID NO: 31708 - protein, 16 aa, Homo sapiens
  ( 258 )...( 273 ): >Q9H323
GRLRLRVSLSHGRTVP

SEQ ID NO: 31709 - protein, 16 aa, Homo sapiens
  ( 259 )...( 274 ): >Q9H323
RLRLRVSLSHGRTVPS

SEQ ID NO: 31710 - protein, 16 aa, Homo sapiens
  ( 260 )...( 275 ): >Q9H323
LRLRVSLSHGRTVPSQ

SEQ ID NO: 31711 - protein, 16 aa, Homo sapiens
  ( 261 )...( 276 ): >Q9H323
RLRVSLSHGRTVPSQI

SEQ ID NO: 31712 - protein, 16 aa, Homo sapiens
  ( 573 )...( 588 ): >Q9H323
KRQKGGSASRRRLSSA

SEQ ID NO: 31713 - protein, 16 aa, Homo sapiens
  ( 574 )...( 589 ): >Q9H323
RQKGGSASRRRLSSAS

SEQ ID NO: 31714 - protein, 16 aa, Homo sapiens
  ( 20 )...( 35 ): >Q8N2W9
LQMLLGFVGRSKSGLK

SEQ ID NO: 31715 - protein, 16 aa, Homo sapiens
  ( 110 )...( 125 ): >Q8N2W9
VLYGKYLNGLGRLPAK

SEQ ID NO: 31716 - protein, 16 aa, Homo sapiens
  ( 111 )...( 126 ): >Q8N2W9
LYGKYLNGLGRLPAKT

SEQ ID NO: 31717 - protein, 16 aa, Homo sapiens
  ( 112 )...( 127 ): >Q8N2W9
YGKYLNGLGRLPAKTL

SEQ ID NO: 31718 - protein, 16 aa, Homo sapiens
  ( 113 )...( 128 ): >Q8N2W9
GKYLNGLGRLPAKTLK

SEQ ID NO: 31719 - protein, 16 aa, Homo sapiens
  ( 114 )...( 129 ): >Q8N2W9
KYLNGLGRLPAKTLKP

SEQ ID NO: 31720 - protein, 16 aa, Homo sapiens
  ( 117 )...( 132 ): >Q8N2W9
NGLGRLPAKTLKPEVR

SEQ ID NO: 31721 - protein, 16 aa, Homo sapiens
  ( 118 )...( 133 ): >Q8N2W9
GLGRLPAKTLKPEVRL

SEQ ID NO: 31722 - protein, 16 aa, Homo sapiens
  ( 119 )...( 134 ): >Q8N2W9
LGRLPAKTLKPEVRLV

SEQ ID NO: 31723 - protein, 16 aa, Homo sapiens
  ( 120 )...( 135 ): >Q8N2W9
GRLPAKTLKPEVRLVK

SEQ ID NO: 31724 - protein, 16 aa, Homo sapiens
  ( 121 )...( 136 ): >Q8N2W9
RLPAKTLKPEVRLVKL

SEQ ID NO: 31725 - protein, 16 aa, Homo sapiens
  ( 122 )...( 137 ): >Q8N2W9
LPAKTLKPEVRLVKLP

SEQ ID NO: 31726 - protein, 16 aa, Homo sapiens
  ( 123 )...( 138 ): >Q8N2W9
PAKTLKPEVRLVKLPF

SEQ ID NO: 31727 - protein, 16 aa, Homo sapiens
  ( 124 )...( 139 ): >Q8N2W9
AKTLKPEVRLVKLPFF

SEQ ID NO: 31728 - protein, 16 aa, Homo sapiens
  ( 317 )...( 332 ): >Q8N2W9
TTGVRVSLICPLVKMR

SEQ ID NO: 31729 - protein, 16 aa, Homo sapiens
  ( 318 )...( 333 ): >Q8N2W9
TGVRVSLICPLVKMRL

SEQ ID NO: 31730 - protein, 16 aa, Homo sapiens
  ( 319 )...( 334 ): >Q8N2W9
GVRVSLICPLVKMRLS

SEQ ID NO: 31731 - protein, 16 aa, Homo sapiens
  ( 320 )...( 335 ): >Q8N2W9
VRVSLICPLVKMRLSV

SEQ ID NO: 31732 - protein, 16 aa, Homo sapiens
  ( 321 )...( 336 ): >Q8N2W9
RVSLICPLVKMRLSVP

SEQ ID NO: 31733 - protein, 16 aa, Homo sapiens
  ( 492 )...( 507 ): >Q8N2W9
EGPRPKRRCPFQKGLV

SEQ ID NO: 31734 - protein, 16 aa, Homo sapiens
  ( 83 )...( 98 ): >Q9BY83
DKASIVRLSVTYLRLR

SEQ ID NO: 31735 - protein, 16 aa, Homo sapiens
  ( 84 )...( 99 ): >Q9BY83
KASIVRLSVTYLRLRR

SEQ ID NO: 31736 - protein, 16 aa, Homo sapiens
  ( 85 )...( 100 ): >Q9BY83
ASIVRLSVTYLRLRRF

SEQ ID NO: 31737 - protein, 16 aa, Homo sapiens
  ( 86 )...( 101 ): >Q9BY83
SIVRLSVTYLRLRRFA

SEQ ID NO: 31738 - protein, 16 aa, Homo sapiens
  ( 87 )...( 102 ): >Q9BY83
IVRLSVTYLRLRRFAA

SEQ ID NO: 31739 - protein, 16 aa, Homo sapiens
  ( 88 )...( 103 ): >Q9BY83
VRLSVTYLRLRRFAAL

SEQ ID NO: 31740 - protein, 16 aa, Homo sapiens
  ( 89 )...( 104 ): >Q9BY83
RLSVTYLRLRRFAALG

SEQ ID NO: 31741 - protein, 16 aa, Homo sapiens
  ( 90 )...( 105 ): >Q9BY83
LSVTYLRLRRFAALGA

SEQ ID NO: 31742 - protein, 16 aa, Homo sapiens
  ( 91 )...( 106 ): >Q9BY83
SVTYLRLRRFAALGAP

SEQ ID NO: 31743 - protein, 16 aa, Homo sapiens
  ( 92 )...( 107 ): >Q9BY83
VTYLRLRRFAALGAPP

SEQ ID NO: 31744 - protein, 16 aa, Homo sapiens
  ( 96 )...( 111 ): >Q9BY83
RLRRFAALGAPPWGLR

SEQ ID NO: 31745 - protein, 16 aa, Homo sapiens
  ( 242 )...( 257 ): >Q9BY83
VQERSFFVRMKSTLTK

SEQ ID NO: 31746 - protein, 16 aa, Homo sapiens
  ( 244 )...( 259 ): >Q9BY83
ERSFFVRMKSTLTKRG

SEQ ID NO: 31747 - protein, 16 aa, Homo sapiens
  ( 245 )...( 260 ): >Q9BY83
RSFFVRMKSTLTKRGL

SEQ ID NO: 31748 - protein, 16 aa, Homo sapiens
  ( 246 )...( 261 ): >Q9BY83
SFFVRMKSTLTKRGLH

SEQ ID NO: 31749 - protein, 16 aa, Homo sapiens
  ( 247 )...( 262 ): >Q9BY83
FFVRMKSTLTKRGLHV

SEQ ID NO: 31750 - protein, 16 aa, Homo sapiens
  ( 248 )...( 263 ): >Q9BY83
FVRMKSTLTKRGLHVK

SEQ ID NO: 31751 - protein, 16 aa, Homo sapiens
  ( 249 )...( 264 ): >Q9BY83
VRMKSTLTKRGLHVKA

SEQ ID NO: 31752 - protein, 16 aa, Homo sapiens
  ( 250 )...( 265 ): >Q9BY83
RMKSTLTKRGLHVKAS

SEQ ID NO: 31753 - protein, 16 aa, Homo sapiens
  ( 251 )...( 266 ): >Q9BY83
MKSTLTKRGLHVKASG

SEQ ID NO: 31754 - protein, 16 aa, Homo sapiens
  ( 252 )...( 267 ): >Q9BY83
KSTLTKRGLHVKASGY

SEQ ID NO: 31755 - protein, 16 aa, Homo sapiens
  ( 253 )...( 268 ): >Q9BY83
STLTKRGLHVKASGYK

SEQ ID NO: 31756 - protein, 16 aa, Homo sapiens
  ( 254 )...( 269 ): >Q9BY83
TLTKRGLHVKASGYKV

SEQ ID NO: 31757 - protein, 16 aa, Homo sapiens
  ( 255 )...( 270 ): >Q9BY83
LTKRGLHVKASGYKVI

SEQ ID NO: 31758 - protein, 16 aa, Homo sapiens
  ( 256 )...( 271 ): >Q9BY83
TKRGLHVKASGYKVIH

SEQ ID NO: 31759 - protein, 16 aa, Homo sapiens
  ( 257 )...( 272 ): >Q9BY83
KRGLHVKASGYKVIHV

SEQ ID NO: 31760 - protein, 16 aa, Homo sapiens
  ( 262 )...( 277 ): >Q9BY83
VKASGYKVIHVTGRLR

SEQ ID NO: 31761 - protein, 16 aa, Homo sapiens
  ( 263 )...( 278 ): >Q9BY83
KASGYKVIHVTGRLRA

SEQ ID NO: 31762 - protein, 16 aa, Homo sapiens
  ( 266 )...( 281 ): >Q9BY83
GYKVIHVTGRLRAHAL

SEQ ID NO: 31763 - protein, 16 aa, Homo sapiens
  ( 267 )...( 282 ): >Q9BY83
YKVIHVTGRLRAHALG

SEQ ID NO: 31764 - protein, 16 aa, Homo sapiens
  ( 268 )...( 283 ): >Q9BY83
KVIHVTGRLRAHALGL

SEQ ID NO: 31765 - protein, 16 aa, Homo sapiens
  ( 360 )...( 375 ): >Q9BY83
KGQVMTGYYRWLQRAG

SEQ ID NO: 31766 - protein, 16 aa, Homo sapiens
  ( 455 )...( 470 ): >Q9BY83
APQTQGKRIKVEPGPR

SEQ ID NO: 31767 - protein, 16 aa, Homo sapiens
  ( 458 )...( 473 ): >Q9BY83
TQGKRIKVEPGPRETK

SEQ ID NO: 31768 - protein, 16 aa, Homo sapiens
  ( 459 )...( 474 ): >Q9BY83
QGKRIKVEPGPRETKG

SEQ ID NO: 31769 - protein, 16 aa, Homo sapiens
  ( 460 )...( 475 ): >Q9BY83
GKRIKVEPGPRETKGS

SEQ ID NO: 31770 - protein, 15 aa, Homo sapiens
  ( 45 )...( 60 ): >Q9UM69
KARQVAAEHGFGVRK

SEQ ID NO: 31771 - protein, 16 aa, Homo sapiens
  ( 35 )...( 50 ): >Q9UBP5
IRLNSPTTTSQIMARK

SEQ ID NO: 31772 - protein, 16 aa, Homo sapiens
  ( 36 )...( 51 ): >Q9UBP5
RLNSPTTTSQIMARKK

SEQ ID NO: 31773 - protein, 16 aa, Homo sapiens
  ( 37 )...( 52 ): >Q9UBP5
LNSPTTTSQIMARKKR

SEQ ID NO: 31774 - protein, 16 aa, Homo sapiens
  ( 38 )...( 53 ): >Q9UBP5
NSPTTTSQIMARKKRR

SEQ ID NO: 31775 - protein, 16 aa, Homo sapiens
  ( 39 )...( 54 ): >Q9UBP5
SPTTTSQIMARKKRRG

SEQ ID NO: 31776 - protein, 16 aa, Homo sapiens
  ( 40 )...( 55 ): >Q9UBP5
PTTTSQIMARKKRRGI

SEQ ID NO: 31777 - protein, 16 aa, Homo sapiens
  ( 41 )...( 56 ): >Q9UBP5
TTTSQIMARKKRRGII

SEQ ID NO: 31778 - protein, 16 aa, Homo sapiens
  ( 42 )...( 57 ): >Q9UBP5
TTSQIMARKKRRGIIE

SEQ ID NO: 31779 - protein, 16 aa, Homo sapiens
  ( 43 )...( 58 ): >Q9UBP5
TSQIMARKKRRGIIEK

SEQ ID NO: 31780 - protein, 16 aa, Homo sapiens
  ( 71 )...( 86 ): >Q9UBP5
LRRLVPTAFEKQGSAK

SEQ ID NO: 31781 - protein, 16 aa, Homo sapiens
  ( 72 )...( 87 ): >Q9UBP5
RRLVPTAFEKQGSAKL

SEQ ID NO: 31782 - protein, 16 aa, Homo sapiens
  ( 149 )...( 164 ): >Q9UBP5
LRVRLVSHLSTCATQR

SEQ ID NO: 31783 - protein, 16 aa, Homo sapiens
  ( 59 )...( 74 ): >O00150
SLSVKPDKCKILKKTV

SEQ ID NO: 31784 - protein, 16 aa, Homo sapiens
  ( 66 )...( 81 ): >O00150
KCKILKKTVDQIQLMK

SEQ ID NO: 31785 - protein, 16 aa, Homo sapiens
  ( 67 )...( 82 ): >O00150
CKILKKTVDQIQLMKR

SEQ ID NO: 31786 - protein, 16 aa, Homo sapiens
  ( 68 )...( 83 ): >O00150
KILKKTVDQIQLMKRM

SEQ ID NO: 31787 - protein, 16 aa, Homo sapiens
  ( 243 )...( 258 ): >O00150
LICIARRLPRPPAITG

SEQ ID NO: 31788 - protein, 16 aa, Homo sapiens
  ( 244 )...( 259 ): >O00150
ICIARRLPRPPAITGV

SEQ ID NO: 31789 - protein, 16 aa, Homo sapiens
  ( 485 )...( 500 ): >O00150
QFMSPRRQVTSGLATR

SEQ ID NO: 31790 - protein, 16 aa, Homo sapiens
  ( 487 )...( 502 ): >O00150
MSPRRQVTSGLATRPR

SEQ ID NO: 31791 - protein, 16 aa, Homo sapiens
  ( 488 )...( 503 ): >O00150
SPRRQVTSGLATRPRM

SEQ ID NO: 31792 - protein, 16 aa, Homo sapiens
  ( 489 )...( 504 ): >O00150
PRRQVTSGLATRPRMP

SEQ ID NO: 31793 - protein, 16 aa, Homo sapiens
  ( 490 )...( 505 ): >O00150
RRQVTSGLATRPRMPN

SEQ ID NO: 31794 - protein, 16 aa, Homo sapiens
  ( 491 )...( 506 ): >O00150
RQVTSGLATRPRMPNN

SEQ ID NO: 31795 - protein, 16 aa, Homo sapiens
  ( 852 )...( 867 ): >O00150
ASLQSATARPTSRLNR

SEQ ID NO: 31796 - protein, 16 aa, Homo sapiens
  ( 853 )...( 868 ): >O00150
SLQSATARPTSRLNRL

SEQ ID NO: 31797 - protein, 16 aa, Homo sapiens
  ( 854 )...( 869 ): >O00150
LQSATARPTSRLNRLP

SEQ ID NO: 31798 - protein, 16 aa, Homo sapiens
  ( 59 )...( 74 ): >Q15170
LRCSSRRTPSAGLSRK

SEQ ID NO: 31799 - protein, 16 aa, Homo sapiens
  ( 70 )...( 85 ): >Q9NP62
RILKKSCLGVVVCGRD

SEQ ID NO: 31800 - protein, 16 aa, Homo sapiens
  ( 90 )...( 105 ): >Q9NP62
EGRKIYLRPAICDKAR

SEQ ID NO: 31801 - protein, 16 aa, Homo sapiens
  ( 91 )...( 106 ): >Q9NP62
GRKIYLRPAICDKARQ

SEQ ID NO: 31802 - protein, 16 aa, Homo sapiens
  ( 156 )...( 171 ): >Q9NP62
KPETKLEAEARRAMKK

SEQ ID NO: 31803 - protein, 16 aa, Homo sapiens
  ( 159 )...( 174 ): >Q9NP62
TKLEAEARRAMKKVNT

SEQ ID NO: 31804 - protein, 16 aa, Homo sapiens
  ( 160 )...( 175 ): >Q9NP62
KLEAEARRAMKKVNTA

SEQ ID NO: 31805 - protein, 16 aa, Homo sapiens
  ( 164 )...( 179 ): >Q9NP62
EARRAMKKVNTAPSSV

SEQ ID NO: 31806 - protein, 16 aa, Homo sapiens
  ( 166 )...( 181 ): >Q9NP62
RRAMKKVNTAPSSVSL

SEQ ID NO: 31807 - protein, 16 aa, Homo sapiens
  ( 111 )...( 126 ): >Q9Y2Y4
RARGDRAKKPDPGLKK

SEQ ID NO: 31808 - protein, 16 aa, Homo sapiens
  ( 188 )...( 203 ): >Q9Y2Y4
QTRSKEKRLQAPVGQR

SEQ ID NO: 31809 - protein, 16 aa, Homo sapiens
  ( 189 )...( 204 ): >Q9Y2Y4
TRSKEKRLQAPVGQRG

SEQ ID NO: 31810 - protein, 16 aa, Homo sapiens
  ( 190 )...( 205 ): >Q9Y2Y4
RSKEKRLQAPVGQRGA

SEQ ID NO: 31811 - protein, 16 aa, Homo sapiens
  ( 194 )...( 209 ): >Q9Y2Y4
KRLQAPVGQRGADGKH

SEQ ID NO: 31812 - protein, 16 aa, Homo sapiens
  ( 175 )...( 190 ): >Q9UKY1
GISISKTPIMKMMKNK

SEQ ID NO: 31813 - protein, 16 aa, Homo sapiens
  ( 176 )...( 191 ): >Q9UKY1
ISISKTPIMKMMKNKV

SEQ ID NO: 31814 - protein, 16 aa, Homo sapiens
  ( 179 )...( 194 ): >Q9UKY1
SKTPIMKMMKNKVENK

SEQ ID NO: 31815 - protein, 16 aa, Homo sapiens
  ( 183 )...( 198 ): >Q9UKY1
IMKMMKNKVENKRIAV

SEQ ID NO: 31816 - protein, 16 aa, Homo sapiens
  ( 327 )...( 342 ): >Q9UKY1
QIKIWFSAQRLKHGVS

SEQ ID NO: 31817 - protein, 16 aa, Homo sapiens
  ( 351 )...( 366 ): >Q9UKY1
ARRKQFNGTVHTVPQT

SEQ ID NO: 31818 - protein, 16 aa, Homo sapiens
  ( 352 )...( 367 ): >Q9UKY1
RRKQFNGTVHTVPQTI

SEQ ID NO: 31819 - protein, 16 aa, Homo sapiens
  ( 465 )...( 480 ): >Q9UKY1
FGIRAKKTKEQLAELK

SEQ ID NO: 31820 - protein, 16 aa, Homo sapiens
  ( 466 )...( 481 ): >Q9UKY1
GIRAKKTKEQLAELKV

SEQ ID NO: 31821 - protein, 16 aa, Homo sapiens
  ( 494 )...( 509 ): >Q9UKY1
IIRLMKITGLTKGEIK

SEQ ID NO: 31822 - protein, 16 aa, Homo sapiens
  ( 495 )...( 510 ): >Q9UKY1
IRLMKITGLTKGEIKK

SEQ ID NO: 31823 - protein, 16 aa, Homo sapiens
  ( 496 )...( 511 ): >Q9UKY1
RLMKITGLTKGEIKKW

SEQ ID NO: 31824 - protein, 16 aa, Homo sapiens
  ( 732 )...( 747 ): >Q9UKY1
SSMNGLSSLRKRGRGR

SEQ ID NO: 31825 - protein, 16 aa, Homo sapiens
  ( 733 )...( 748 ): >Q9UKY1
SMNGLSSLRKRGRGRP

SEQ ID NO: 31826 - protein, 16 aa, Homo sapiens
  ( 734 )...( 749 ): >Q9UKY1
MNGLSSLRKRGRGRPK

SEQ ID NO: 31827 - protein, 16 aa, Homo sapiens
  ( 735 )...( 750 ): >Q9UKY1
NGLSSLRKRGRGRPKG

SEQ ID NO: 31828 - protein, 16 aa, Homo sapiens
  ( 771 )...( 786 ): >Q9UKY1
RGPSLIKFKTGTAILK

SEQ ID NO: 31829 - protein, 16 aa, Homo sapiens
  ( 62 )...( 77 ): >Q8IZE0
RQLLLQQQTSGLKSPK

SEQ ID NO: 31830 - protein, 16 aa, Homo sapiens
  ( 488 )...( 503 ): >Q8IZE0
VITPASVPNVGAIRRR

SEQ ID NO: 31831 - protein, 16 aa, Homo sapiens
  ( 489 )...( 504 ): >Q8IZE0
ITPASVPNVGAIRRRH

SEQ ID NO: 31832 - protein, 16 aa, Homo sapiens
  ( 492 )...( 507 ): >Q8IZE0
ASVPNVGAIRRRHSDK

SEQ ID NO: 31833 - protein, 16 aa, Homo sapiens
  ( 603 )...( 618 ): >Q8IZE0
VEYQKRRSQKITGSPT

SEQ ID NO: 31834 - protein, 16 aa, Homo sapiens
  ( 604 )...( 619 ): >Q8IZE0
EYQKRRSQKITGSPTL

SEQ ID NO: 31835 - protein, 16 aa, Homo sapiens
  ( 605 )...( 620 ): >Q8IZE0
YQKRRSQKITGSPTLV

SEQ ID NO: 31836 - protein, 16 aa, Homo sapiens
  ( 606 )...( 621 ): >Q8IZE0
QKRRSQKITGSPTLVK

SEQ ID NO: 31837 - protein, 16 aa, Homo sapiens
  ( 607 )...( 622 ): >Q8IZE0
KRRSQKITGSPTLVKN

SEQ ID NO: 31838 - protein, 16 aa, Homo sapiens
  ( 608 )...( 623 ): >Q8IZE0
RRSQKITGSPTLVKNI

SEQ ID NO: 31839 - protein, 16 aa, Homo sapiens
  ( 405 )...( 420 ): >AAD09186
KGIMQKVAGERYVYKF

SEQ ID NO: 31840 - skipped

SEQ ID NO: 31841 - protein, 13 aa, Homo sapiens
  ( 1 )...( 13 ): >Ps-1-F 97-109 (6) del -I
VATKSVSVFYTRK

SEQ ID NO: 31842 - protein, 14 aa, Homo sapiens
  ( 1 )...( 14 ): >Ps-1-F 97-109 (6)
VATIKSVSVFYTRK

SEQ ID NO: 31843 - protein, 12 aa, Homo sapiens
  ( 1 )...( 12 ): >Ps-1-F 151-162 (7)
VVLYKYRCYKVI

SEQ ID NO: 31844 - protein, 13 aa, Homo sapiens
  ( 1 )...( 13 ): >Ps-1-F 305-317 (11)
AQRRVSKNSKYNA

SEQ ID NO: 31845 - protein, 15 aa, Homo sapiens
  ( 1 )...( 15 ): >PS-1-F 151-165
VVLYKYRCYKVIHAW

SEQ ID NO: 31846 - protein, 15 aa, Homo sapiens
  ( 1 )...( 15 ): >PS-1-F 151-165 H163R
VVLYKYRCYKVIRAW

SEQ ID NO: 31847 - protein, 15 aa, Homo sapiens
  ( 1 )...( 15 ): >PS-1-F 151-165 H163Y
VVLYKYRCYKVIYAW

SEQ ID NO: 31848 - protein, 17 aa, Homo sapiens
  ( 1 )...( 17 ): >PS-1-F 147-163
TILLVVLYKYRCYKVIH

SEQ ID NO: 31849 - protein, 17 aa, Homo sapiens
  ( 1 )...( 17 ): >PS-1-F 147-163 H163R
TILLVVLYKYRCYKVIR

SEQ ID NO: 31850 - protein, 16 aa, Homo sapiens
  ( 1 )...( 16 ): >PS-1-F 148-163 H163R
ILLVVLYKYRCYKVIR

SEQ ID NO: 31851 - protein, 15 aa, Homo sapiens
  ( 1 )...( 15 ): >PS-1-F 149-163 H163R
LLVVLYKYRCYKVIR

SEQ ID NO: 31852 - protein, 14 aa, Homo sapiens
  ( 1 )...( 14 ): >PS-1-F 150-163 H163R
LVVLYKYRCYKVIR

SEQ ID NO: 31853 - protein, 13 aa, Homo sapiens
  ( 1 )...( 13 ): >PS-1-F 151-163 H163R
VVLYKYRCYKVIR

SEQ ID NO: 31854 - protein, 17 aa, Homo sapiens
  ( 1 )...( 17 ): >APP-F 521-537 (1)
KKAAQIRSQVMTHLRVI

SEQ ID NO: 31855 - protein, 15 aa, Homo sapiens
  ( 1 )...( 15 ): >APP-F 712-726 (3)
IATVIVITLVMLKKK

SEQ ID NO: 31856 - protein, 15 aa, Homo sapiens
  ( 1 )...( 15 ): >APP-F 712-726 V717F
IATVIVITLVMLKKK

SEQ ID NO: 31857 - protein, 13 aa, Homo sapiens
  ( 1 )...( 13 ): >APH-1a-F 97-109
VFRFAYYKLLKKA

SEQ ID NO: 31858 - protein, 18 aa, Homo sapiens
  ( 1 )...( 18 ): >BACE-F 296-313
RLPKKVFEAAVKSIKAAS

SEQ ID NO: 31859 - protein, 20 aa, Homo sapiens
  ( 1 )...( 20 ): >Nct-F 616-635 (I)
RLPRCVRSTARLARALSPAF

SEQ ID NO: 31860 - protein, 16 aa, Homo sapiens
  ( 1 )...( 16 ): >Nct-F 651-666 (II)
SRWKDIRARIFLIASK

SEQ ID NO: 31861 - protein, 21 aa, Homo sapiens
  ( 1 )...( 21 ): >Nct-F 414-434 (III)
RRPNQSQPLPPSSLQRFLRAR

SEQ ID NO: 31862 - protein, 16 aa, Homo sapiens
  ( 1 )...( 16 ): >PEN-2 11-26
KLNLCRKYYLGGFAFL

SEQ ID NO: 31863 - protein, 14 aa, Homo sapiens
  ( 1 )...( 14 ): >PEN-2 63-75
KGYVWRSAVGFLFW

SEQ ID NO: 31864 - protein, 12 aa, Homo sapiens
  ( 1 )...( 12 ): >PEN-2 78-89
FQIYRPRWGALG

SEQ ID NO: 31865 - skipped

SEQ ID NO: 31866 - protein, 8 aa, Rattus norvegicus
  ( 1 )...( 8 ): >GOP1 AMIDE
IVIAKLKA

SEQ ID NO: 31867 - protein, 8 aa, Rattus norvegicus
  ( 1 )...( 9 ): >GOP2
CIVIAKLK

SEQ ID NO: 31868 - protein, 8 aa, Rattus norvegicus
  ( 1 )...( 8 ): >GOP3
IVIAKLRA

SEQ ID NO: 31869 - protein, 8 aa, Rattus norvegicus
  ( 1 )...( 8 ): >GOP4
IAIAKLKA

SEQ ID NO: 31870 - protein, 8 aa, Rattus norvegicus
  ( 1 )...( 8 ): >GOP5
IVIAKLAA

SEQ ID NO: 31871 - protein, 8 aa, Artificial Sequence
  All-D analogue ( 1 )...( 8 ): >GOP6
IVIAKLKA

SEQ ID NO: 31872 - protein, 8 aa, Rattus norvegicus
  Nor-(N-met)Valine ( 1 )...( 8 ): >GOP7
IXIAKLKA

SEQ ID NO: 31873 - protein, 10 aa, Rattus norvegicus
  all-N-Me ( 1 )...( 8 ): >GOP8
IALLNMEVIA

SEQ ID NO: 31874 - protein, 5 aa, Artificial Sequence
  Orn ( 1 )...( 5 ): >GOP9
IVXKA

SEQ ID NO: 31875 - protein, 8 aa, Rattus norvegicus
  ( 1 )...( 8 ): >GOP10
AKLKAIVI

SEQ ID NO: 31876 - protein, 8 aa, Rattus norvegicus
  ( 1 )...( 8 ): >GOP11
IAIAKLAA

SEQ ID NO: 31877 - protein, 6 aa, Rattus norvegicus
  ( 1 )...( 6 ): >GOP12
VIAKLK

SEQ ID NO: 31878 - protein, 8 aa, Rattus norvegicus
  N-methyl alanine ( 1 )...( 8 ): >GOP13
IVIXKLKA

SEQ ID NO: 31879 - protein, 8 aa, Rattus norvegicus
  N-methyl alanine ( 1 )...( 8 ): >GOP14
IVIAKLKX

SEQ ID NO: 31880 - protein, 8 aa, Rattus norvegicus
  Aib ( 1 )...( 8 ): >GOP15
IVIXKLKA

SEQ ID NO: 31881 - protein, 8 aa, Homo sapiens
  ( 1 )...( 8 ): >GOP16
IVVSKLKA

SEQ ID NO: 31882 - protein, 8 aa, Rattus norvegicus
  ( 1 )...( 8 ): >GOP17
IVIAKLKA

SEQ ID NO: 31883 - protein, 8 aa, Rattus norvegicus
  Nva, Nle, Citruline ( 1 )...( 8 ): >GOP18
IXIAKXXA

SEQ ID NO: 31884 - protein, 8 aa, Rattus norvegicus
  O-methyl Tyrosine ( 1 )...( 8 ): >GOP25
IXIAKLKA

SEQ ID NO: 31885 - protein, 8 aa, Rattus norvegicus
  Citruline ( 1 )...( 8 ): >GOP26
IVIAXLKA

SEQ ID NO: 31886 - protein, 4 aa, Rattus norvegicus
  ( 1 )...( 4 ): >GOP52
VVKK

SEQ ID NO: 31887 - protein, 16 aa, Rattus norvegicus
  ( 1 )...( 16 ): >Penetratin
RQIKIWFQNRRMKWKK

SEQ ID NO: 31888 - protein, 15 aa, Rattus norvegicus
  ( 1 )...( 15 ): >M511
FLGKKFKKYFLQLLK

SEQ ID NO: 31889 - protein, 15 aa, Artificial Sequence
  peptide ( 1 )...( 15 ): >ScrM511, scrambled M511
KGKFQLYLKLKFKFL

SEQ ID NO: 31890 - protein, 8 aa, Rattus norvegicus
  ( 1 )...( 8 ): >M511 Analogue 1
KKFKKYFL

SEQ ID NO: 31891 - protein, 9 aa, Rattus norvegicus
  ( 1 )...( 9 ): >M511 Analogue 2
KKYFLQLLK

SEQ ID NO: 31892 - protein, 9 aa, Rattus norvegicus
  ( 1 )...( 9 ): >M511 Analogue 3
FKKYFLQLL

SEQ ID NO: 31893 - protein, 9 aa, Rattus norvegicus
  ( 1 )...( 9 ): >M511 Analogue 4
KKFKKYFLQ

SEQ ID NO: 31894 - protein, 7 aa, Artificial Sequence
  Citruline, p-Fluoro phenyl alanine ( 1 )...( 7 ): >M511 Analogue 5
XXFXXXI

SEQ ID NO: 31895 - protein, 8 aa, Artificial Sequence
  Citruline, p-Fluoro phenyl alanine ( 1 )...( 8 ): >M511 Analogue 6
XXXIXIIX

SEQ ID NO: 31896 - protein, 8 aa, Artificial Sequence
  Citruline, p-Fluoro phenyl alanine ( 1 )...( 8 ): >M511 Analogue 7
FXXXIXII

SEQ ID NO: 31897 - protein, 8 aa, Artificial Sequence
  Citruline, p-Fluoro phenyl alanine ( 1 )...( 8 ): >M511 Analogue 8
XXFXXXIX

SEQ ID NO: 31898 - skipped

SEQ ID NO: 31899 - protein, 15 aa, Artificial Sequence
  peptide ( 1 )...( 15 ): >M630
VQAILRRNWNQYKIQ

SEQ ID NO: 31900 - protein, 28 aa, Mus musculus
  ( 1 )...( 28 ): >mouse PrpC (1-28)
MANLGYWLLALFVTMWTDVGLCKKRPKP

SEQ ID NO: 31901 - protein, 28 aa, Homo sapiens
  ( 1 )...( 28 ): >human PrpC(1-28)
MANLGCWMLVLFVATWSDLGLCKKRPKP

SEQ ID NO: 31902 - protein, 30 aa, Bos taurus
  ( 1 )...( 30 ): >bovine PrpC (1-30)
MVKSKIGSWILVLFVAMWSDVGLCKKRPKP

SEQ ID NO: 31903 - protein, 17 aa, Homo sapiens
  ( 1 )...( 17 ): >APP (521-537)
KKAAQIRSQVMTHLRVI

SEQ ID NO: 31904 - protein, 15 aa, Homo sapiens
  ( 1 )...( 15 ): >APP (712-726) WT
IATVIVITLVMLKKK

SEQ ID NO: 31905 - protein, 15 aa, Homo sapiens
  ( 1 )...( 15 ): >APP (712-726) mutant V717F
IATVIFITLVMLKKK

SEQ ID NO: 31906 - protein, 16 aa, Homo sapiens
  ( 1 )...( 16 ): >APP (725-740)
KKKQYTSIHHGVVEVD

SEQ ID NO: 31907 - protein, 25 aa, Homo sapiens
  ( 1 )...( 25 ): >PS-2 (86-110)
KVHIMLFVPVTLCMIVVVATIKSVR

SEQ ID NO: 31908 - protein, 12 aa, Homo sapiens
  ( 1 )...( 12 ): >PS-1 (151-162)
VVLYKYRCYKVI

SEQ ID NO: 31909 - protein, 21 aa, Artificial Sequence
  peptide ( 1 )...( 21 ): >TP 10
AGYLLGKINLKALAALAKKIL

SEQ ID NO: 31910 - protein, 14 aa, Artificial Sequence
  peptide ( 1 )...( 14 ): >YTA-1
YTAIRGIAVLFRCK

SEQ ID NO: 31911 - protein, 16 aa, Artificial Sequence
  peptide ( 1 )...( 16 ): >YTA-2
YTAIAWVKAFIRKLRK

SEQ ID NO: 31912 - protein, 23 aa, Artificial Sequence
  peptide ( 1 )...( 23 ): >YTA-2ps
SGESLAYYTAIAWVKAFIRKLRK

SEQ ID NO: 31913 - protein, 14 aa, Artificial Sequence
  peptide ( 1 )...( 14 ): >LRSW-1
LRSWVISRSIRKAA

SEQ ID NO: 31914 - protein, 14 aa, Artificial Sequence
  peptide ( 1 )...( 14 ): >LRSW-2
LRSWIRRLIKAWKS

SEQ ID NO: 31915 - protein, 13 aa, Artificial Sequence
  peptide ( 1 )...( 13 ): >LRSW-3
LRSWRVIIRNGQR

SEQ ID NO: 31916 - protein, 18 aa, Artificial Sequence
  peptide ( 1 )...( 18 ): >LRSW-1ps
GPLGLRSWVISRSIRKAA

SEQ ID NO: 31917 - protein, 18 aa, Artificial Sequence
  peptide ( 1 )...( 18 ): >LRSW-2ps
GPLGLRSWIRRLIKAWKS

SEQ ID NO: 31918 - protein, 17 aa, Artificial Sequence
  peptide ( 1 )...( 17 ): >LRSW-3ps
GPLGLRSWRVIIRNGQR

SEQ ID NO: 31919 - protein, 16 aa, Artificial Sequence
  peptide ( 1 )...( 16 ): >Evo162
KTVLLRKLLKLLVRKI

SEQ ID NO: 31920 - protein, 17 aa, Artificial Sequence
  peptide ( 1 )...( 17 ): >Evo163
KIIKRLIVVRLITLVIK

SEQ ID NO: 31921 - protein, 16 aa, Artificial Sequence
  peptide ( 1 )...( 16 ): >Evo164
LLKLKLLAILKIKLIV

SEQ ID NO: 31922 - protein, 8 aa, Artificial Sequence
  peptide ( 1 )...( 8 ): >Evo83
KLIRKRLI

SEQ ID NO: 31923 - protein, 8 aa, Artificial Sequence
  peptide ( 1 )...( 8 ): >Evo86
RLIKRLIK

SEQ ID NO: 31924 - protein, 9 aa, Artificial Sequence
  peptide ( 1 )...( 9 ): >Evo86 dimer
CRLIKRLIK

SEQ ID NO: 31925 - protein, 16 aa, Artificial Sequence
  peptide ( 1 )...( 16 ): >Evo165
LLKKRKVVRLIKFLLK

SEQ ID NO: 31926 - protein, 16 aa, Artificial Sequence
  peptide ( 1 )...( 16 ): >Evo165b
LLKKRKVVRLIKQKQK

SEQ ID NO: 31927 - protein, 15 aa, Artificial Sequence
  peptide ( 1 )...( 15 ): >Evo165c
LLKKRKVRLIKQKQK

SEQ ID NO: 31928 - protein, 16 aa, Artificial Sequence
  peptide ( 1 )...( 16 ): >Evo165d
LLKKRKVVRLIKAHSK

SEQ ID NO: 31929 - protein, 15 aa, Artificial Sequence
  peptide ( 1 )...( 15 ): >Evo165e
LLKKRKVRLIKAHSK

SEQ ID NO: 31930 - protein, 15 aa, Artificial Sequence
  peptide ( 1 )...( 15 ): >Evo165f
LLKKRKVVRLIKVRK

SEQ ID NO: 31931 - protein, 15 aa, Artificial Sequence
  peptide ( 1 )...( 15 ): >L407
LKLLYKNKLLKYNLK

SEQ ID NO: 31932 - protein, 16 aa, Artificial Sequence
  peptide ( 1 )...( 16 ): >L408
KLFKYKKLKRYFYLQK

SEQ ID NO: 31933 - protein, 12 aa, Artificial Sequence
  peptide ( 1 )...( 12 ): >L409
YKRLSLVKRLIK
